United States Patent Application Publication US 2008/0276334 A1 - sequence listing, part 12

SEQ ID NO: 82796 - DNA, 266 bp, Glycine max
  Clone ID: 700957765H1
tggagatatcagaagtgagaatgctgacatgagtaacgataaatcctgtgaaaaacacgatcgcctgccagtggaaggctttctgcgttcagtcaatctacgcagagtgaatcggtccctaaggaagccccgaccccgaaagggctgccgtccgatgggtacacgaaagtgacgaagttgctttgactacagaaccatgcctgtctgttggagtgaattggatgatcgggccgagggctgccccctcttcccctcactctcctttc

SEQ ID NO: 82797 - DNA, 262 bp, Glycine max
  Clone ID: 700957767H1
gtttgattggaggagatgactttaagagtggtcagaccaaaatgaaatctgtgttggtggatttccttgtgggggccggcatcaagccaacatctatagtgagttacaaccatctgggcaacaatgatggcatgaatctctcagcccctcaaaccttccgctctaaggaaatctccaagagcaatgttgttgacgatatggtcaacagcaacgccatcctctatgagcccggtgaacatccagaccatgtggttgtcattaa

SEQ ID NO: 82798 - DNA, 119 bp, Glycine max
  Clone ID: 700957769H1
tgagaattgctctgttggtcctgggcatgaatcgtcatccttaactgaagtcttcgaaaatgattttgctgcatcactggctctcatggataaaaccaatgatctcgttgattctatcc

SEQ ID NO: 82799 - DNA, 260 bp, Glycine max
  Clone ID: 700957770H1
ctccaagtctttctgttcattatgttattactaaagggttcatgacattcgtttgaaaccttggtttgtatcaattgtagcactagtttgattttggtgccaagttcttgagctgcggtggtgctgaccctgaaaagttctccaagtccgacatgagataaggctgctgctgctgctgcttttcaaagatgttggagctggtttcaattagtagacaaatttggttgctgaatttcgtgttcatgtgtcttcaatagatg

SEQ ID NO: 82800 - DNA, 69 bp, Glycine max
  Clone ID: 700957771H1
caccaacttcacccattcacctcactcactctttgcttctccattaaccctctgttcgacgccaaaacg

SEQ ID NO: 82801 - DNA, 261 bp, Glycine max
  Clone ID: 700957772H1
gataatccaatatatcaaagcaagaaaaaatggggtccgcaaaatttgctttgatattaacaattgttattatctcaatgtgtagcatttccttggcacaaaattcgcccaaagatttccttgacgcgcacaatgcagctcgtgcagaggttggtgttgagccactcgcatgggacgacaccgtcgcagcctacgctcagcaatatgcggactcgaggatcaaagagtgccaagtagtgcactctcaggggccttatgggg

SEQ ID NO: 82802 - DNA, 259 bp, Glycine max
  Clone ID: 700957773H1
tttaatccctcgcctatatcttcagaaaattagatctgcttcagatctagggtttcccttttccaaatcacgagtccgttgagtttgattttgtggatgaaagcatagggatagggcttttgcaaacctctccaatgtttctcgaaattatatgaccatgcgtcgaattcgtatgctgcactccttctccgtcgtgttcctctactggttctacgttttctcatgaactccctctcaaatccgtaattaattagatcga

SEQ ID NO: 82803 - DNA, 258 bp, Glycine max
  Clone ID: 700957774H1
agccattgagaggatatgttcttgtggcccgtgaaactagtttcgatgcctccgtgttagaatctcctgctctggaaaagccacttaactactcgttaatatggagcctggattcacatgatgagtgtgtttacttttggttgccaaaccctccaacaggttataaagccatgggcatagtagttactagcagtcctaaggaacctgaagttgaagaagttagatgcgtgcgagatgatctcacagaaacttgtgaga

SEQ ID NO: 82804 - DNA, 258 bp, Glycine max
  Clone ID: 700957775H1
attcctaattgtttaaacctaattctcatttcttcatcgttcgattcttctcctcctaaagatgcagatcttcgtgaaaactttgaccggtaagaccatcacccttgaggtggagtcctccgacaccatcgataacctgaaagctaagattcaagacaaggaagggatcccacctgaccagcagagacttatctttgcgggtaaacagcttgaggatggtcgaacccttgccgactacaacatccaaaaggaatccac

SEQ ID NO: 82805 - DNA, 256 bp, Glycine max
  Clone ID: 700957776H1
cttggttttaattggtataggcttgccaaggtcttgttgattgagcgttaagtgctttaactaatcaatcccaagaccttggtttaccttgccacacaaaaaaatatataaaaaggcaaaataataataaaaaaaagagaaggcttggagccaagaaaataaacacaaagcagcagtcatggaaagaataatggttggaagtgcaacaaaggttgctttcaacctcttggtcactttcgccattgtcattccatgc

SEQ ID NO: 82806 - DNA, 251 bp, Glycine max
  Clone ID: 700957777H1
gctttttgaagttgaaactgataaaaatcacgcatctaatctcgaggtactgatacaaaaactcctggagtgaaaaatgggaaagtttcaagtaaagaggcaaagtctaaggctctaaatgcatctcttgggaaaagcaaatctgatatgacgtcaagaagcaaagcatcccctggaagcaaaactagagttacaaagagcaaatctgagaaggaagaggaaaatagaaagaataaggaggaactgatgat

SEQ ID NO: 82807 - DNA, 256 bp, Glycine max
  Clone ID: 700957778H1
gttgaaatgaaaatgggttcttctttgtggactttgtgtctaattttggcttcactagcctcttctgcattctgtgcctttccacggaggccagtggacgttccattcggcagaaactacgttcccacttgggcttttgatcacatcaaatacttcaatggaggttctgagattcaacttcatcttgacaagtacactggtactggcttccagtccaaagggtcatacttgtttggtcacttcagcatgaacataa

SEQ ID NO: 82808 - DNA, 258 bp, Glycine max
  Clone ID: 700957779H1
ctgtggcacaggcaaactagaggttgcagtgttatgcaacccttaggatgccacttgttccaatgcttcggaatatgtcttttgggatagttatcatccaacagaaggagtttacagaaagctcgtaaattatgttcttgaaaagtacatagatcgattgttttgagctcgattaagtttgcctacgggaagtaatatcaattattagttatgttgatgtcaacgaagacaatgagtattttgatttgtcgagttttg

SEQ ID NO: 82809 - DNA, 269 bp, Glycine max
  Clone ID: 700957780H1
gtatggttctgcggctttgcttgtcaacttcactgccattatcacaatcttatttggagcctttgttgtgttatctgctctagctgatgctcccccagcccctgcagcagatgactatgaagccatatagacacttgtaagtttgtatcatatttttattttatggaataatctcatgtctgctataaaagtttgtattgggagttggaggaaggaaataatttgttgtttgtattctcggatctaaagcttgtatttaatcatcaatt

SEQ ID NO: 82810 - DNA, 261 bp, Glycine max
  Clone ID: 700957781H1
gtgggatgcagaaggaacaatgcatcttgtaaatcaaaccttgaatgcatctactgtaaattcaaatgaccagagcttaggggaaaggggttacgttgtgatgcgagcagcggctagaaaaaatactgctcaggaaggagatctctctgtgaatgtggatatggcttcaggcattggtcttgatcctgtagcaaaaatgcctcccagaacgggcaaatcaaagacaaaaattatagtccagagattgatacgcacactgcg

SEQ ID NO: 82811 - DNA, 262 bp, Glycine max
  Clone ID: 700957782H1
caagattgacgagactgttggagatgcagctaatgcagctgttgaggatataaagagctttgctagttctgttgttgtcaacaaggactccgtaattcctaataataataaattcctgacggcctatacaaatattgtgccaaagctaaaaaatgctaacctctcagtttttgtagaaacattcagcaatgagtttgtgtctcaagcatgggatttcttctcagatccaactgttgagatcaactcgtatattgagggagca

SEQ ID NO: 82812 - DNA, 258 bp, Glycine max
  Clone ID: 700957783H1
cgataattatgacagggagttggaggatgtaatagataagcttattggtgagtgtgataggaaaattggcagggctctaaagcggctcgaggacgacgatgcgaaagcggctattgcaatttcggtctctgaagttactcaaacagatgaggtgcttgagttgtcgaagcaaatcaaagagaaattgaaagaagctgatcaatatgatcttgaaggcaagtcagatctcaagattcgagctttagaggttgtagagga

SEQ ID NO: 82813 - DNA, 260 bp, Glycine max
  Clone ID: 700957784H1
tggttttgttgttggtgggtttcagcgttccgcttcaacttcaaattctcagtgaaaccaattcagttcagtccaaatcccaaatccgaagtgagatttgcgatggagaggcttcagcgaatgttcgcaggtgcaggtggagctctagggcaccctcccccagattccccaactctcgattcctccgagcaggtctacatctcctcactcgctctcctcaagatgctgaagcacggaagggctggggttcccatggaagt

SEQ ID NO: 82814 - DNA, 214 bp, Glycine max
  Clone ID: 700957787H1
ctgaacttatcgcttcttcccggtttgaatttgggtgtttccgtttcaatggatgacggcgagcttgatttctccaaccatgaagtgttttcgagtcccaacatgggtgagcttcccagcagcggttcaatggacagtttcttcgacgagcttctcaaggacacgcacgcctgcacccacacccacacctgtaaccctcccggccccgatttct

SEQ ID NO: 82815 - DNA, 259 bp, Glycine max
  Clone ID: 700957788H1
tggccactctcctctgagaaagcctccagcctctcctccaaagtcccctgcggttcgttcggttattcttcgaaccgttgtctgaagtttacaactcaaaacttcaccgaacgcatttcattcaccaattcgtccaagtctcgtatcaatcaatcagcctatccgtcttgcggttggagagatcggaggggagagcagccatggcgcatcgagtagaccacgactatgactatctgttcaagatcgtattgatcggaga

SEQ ID NO: 82816 - DNA, 253 bp, Glycine max
  Clone ID: 700957791H1
agcgaagagaatggctcccaaggatttaatctttttggctgtgttatgcttctcagcactgtcactgagtcgttgtcttgcggaggataatggacttgttatgaacttctacaaggaatcatgccctcaggctgaagacatcatcaaagaacaagtcaagcttctctacaagcgccacaagaacactgctttctcctggctcagaaacatcttccatgactgtgctgttcagagttgtgatgcttcactgttg

SEQ ID NO: 82817 - DNA, 253 bp, Glycine max
  Clone ID: 700957792H1
cgatccccttctccttctctctctctttttcgcctcattccattttcatctatcaatggctccagtagcagcagcatcttcagattcaatcaagccaagagatgtttgcatcgttggtgttgcacgtacaccaatgggtggatttcttggtactctgtcatctctatctgccaccaagctaggctctatagctattgaagctgctcttaaaagggccaatgttgatccatcccttgtggaagaagtatttttt

SEQ ID NO: 82818 - DNA, 258 bp, Glycine max
  Clone ID: 700957795H1
cttgtcccattcaagcacttgatttctagttacataacaactatatgcatcttgtaactacttaaaccgtttcctacgatttgactctacttttgattccctttccagccaccaaatcaaaccaatacctcactgtttcatagcttttttcttcaacccaacttcgtggtcaacaatgatggattcagaaggagcactgccccaggttcaggaaatagagcaagaaggtgtcggtggagggactaacaagaagatgga

SEQ ID NO: 82819 - DNA, 253 bp, Glycine max
  Clone ID: 700957796H1
acctgctcaacactcttcagatccaaagcccataaaaagagaataagttgtggtctctgaggatctaggccagagggcttttcaatcactggctcctgctgtcggtagccatacatctactcctgttgcagttgtggtccctgttgggaatgtgccaataactactattgaaaagtcagttgtgtctgtatctcctcttgctgatcaatccagaaatgatcagaatgttgagaagaggattatgtcagatgag

SEQ ID NO: 82820 - DNA, 68 bp, Glycine max
  Clone ID: 700957805H1
gccacatagagggaagcttggttatggtattggtgtctcgggattgtgataaatctgttgatgacttt

SEQ ID NO: 82821 - DNA, 254 bp, Glycine max
  Clone ID: 700957807H1
gttcctggctcatcaagaagctactggccaagggctacacagttcatgcaactctcagagacttgaagaatgagtcaaaggttggcctcttaaagagccttccacaatcagaaggaaaactggtgctgtttgaagctgatatttacaacccaaatgattttgaccttgcaattgaaggctgcaagtttgtgtttcatgttgctactcccatgatccatgaacctggctcccagtacaaggatactagtgaagcg

SEQ ID NO: 82822 - DNA, 257 bp, Glycine max
  Clone ID: 700957808H1
gtttctctctcttcggtcagaaacatgaatttggaaacgcaaccaggaacggcgtcgtattggtgctacagctgcacccgtttcgtgcacctctctgtccaaagcaccatcgcctgcccccactgtcaaagcggtttcgtcgaagagatccgtgccggcgccggagccgaagcctcgccacgccatcgactaagtcctttccccgatgatcctcttttgctccggcgacagggcttccgccgccgtaggagagaagc

SEQ ID NO: 82823 - DNA, 252 bp, Glycine max
  Clone ID: 700957810H1
cgacactgtcagcaagcacgatttcatcgtcgtcgagttctacgccccatggtgtgatcactgtaagaagcttgctccggagtatgagaaagctgcttctatcttgagtagtcatgatcctcctattgttttggctaaagtagatgccaatgaggagaagaacaaagaccttgcatcacaatatgatgttaagggattcccaacaattaatattctgagaaatgggggaaagaatgttcaggaatacaaagg

SEQ ID NO: 82824 - DNA, 255 bp, Glycine max
  Clone ID: 700957811H1
ctgaggactgggacgaaagagccaaaatcccggacccaagtgctgtgaagccagatgactgggatgaggatgcacccatggaaattttagatgaagaagcagagaaacctgaaggatggttggatgacgagccagaggaaattgatgacccagaggcgacaaaacccgaagactgggatgatgaggaggatggtgaatgggaagccccaaagattgaaaacccgaagtgtgaggcagcccctggttgtggtgaat

SEQ ID NO: 82825 - DNA, 85 bp, Glycine max
  Clone ID: 700957812H1
gtgtttcgctgtctctcccatcctttcgcattctcaataccctttagatttgtgaaaggaaagcaaacatggttgagcaggtcca

SEQ ID NO: 82826 - DNA, 255 bp, Glycine max
  Clone ID: 700957813H1
gtgcaagaagaggaagaagttgagttgagttgaggttggagctgaaagaaaattgagtgagaattcaatgacacagaatctgaagcataccgtggatttggaatgcagtgataatagcaggccgtcaaagatatcaaaaatcgagtatccgagtgacagtgacattgacgaagaagaagaaggaatgagccaaaaccctaggaatgggattcagcgctatttggttgcaatcgagtatattgggactctcttctc

SEQ ID NO: 82827 - DNA, 258 bp, Glycine max
  Clone ID: 700957815H1
cgtaataagttctatcattgaggaagtttcctgtgcatcgtctccgaaaatgaacgacgcagatgtctcaaagcaaatccagcagatggtgcagttcatccgccaggaagctgaggaaaaggccaacgagatctctgtctccgccgaagaggaattcaatatcgagaagctgcagttggtcgaagccgacaagaagaagatcaggcaagaatacgaacgcaaagagcgccaagttgaaattcgcaagaagattgagta

SEQ ID NO: 82828 - DNA, 262 bp, Glycine max
  Clone ID: 700957816H1
gtacttgttggtggttccaccagaattcccaaggtgcaacaactcctgcaagatttctttaatgggaaggagctctgcaagagcatcaatcctgatgaggctgtggcatatggtgctgcagttcaagctgctatcttgagtggtgagggtaatgagaaggttcaggatcttctccttcttgatgtcacccctctctctcttgggctggaaactgctggtggggtgatgacagtcttgatccccaggaacactactatcccaa

SEQ ID NO: 82829 - DNA, 257 bp, Glycine max
  Clone ID: 700957817H1
attttcttcacctggagagcagcatttcatcttctgagttggctcaaatttttctgaacttaaggtgtaagaatctttcatgtcgaagtcagttgcctgtggacgaatgtgattgcaaggtttgtgcaaagaagaatggtttttgcagggagtgtatgtgccttgtgtgttcaaagtttgataatgcctcaaatacatgtagttgggttggatgtgatgtttgccttcactggtgccatactgactgtggattacgg

SEQ ID NO: 82830 - DNA, 256 bp, Glycine max
  Clone ID: 700957818H1
aaaaattccttctgacttaatagttgaacaattgggtattaaggagtatttgcctgcatatttggatccgaatctcaaatctagtgatcttgttaccggcgtctgctttgcctccggtgcttcaggatacgatcctttgacacccaaaataacgtcagttctatcgttatctactcaactagacatgttcagggaatacataggaaagctgaaaggcattgttggagagagcagaacaaactacatcctatccaat

SEQ ID NO: 82831 - DNA, 212 bp, Glycine max
  Clone ID: 700957819H1
ctatgatcaaacagatggtgctgatggctatgtttctgttgaactatctcccaggctcgctgatgacactgagggaaccatagaagctgcaaaatggcttcataaagtggttgatcgccccaatgtgtatattaagattcctgctacagaggcatgtgtgccttcaattaaggaagttattgctaatgggataagtgtgaatgtgacgctga

SEQ ID NO: 82832 - DNA, 253 bp, Glycine max
  Clone ID: 700957820H1
tatgtctctatttcttttctctctctataaataagcagccttacaactcttcttaatcccatcaaatcgaaccctttttaaacgctcaaatacaaatttctggcaccaaatccttcccactctcctcaattccattcatttcaactcaacaatctctcctatccgtcaaacaaaatataaaagatagaaaaccctagttctgtaaatatataaaggaaaaaaggtctgatagatacccattgtcaataagatc

SEQ ID NO: 82833 - DNA, 256 bp, Glycine max
  Clone ID: 700957824H1
ctcctctgaacctcaaacaccaaaacaaagcattacaattctcaatttcacataaacaccagaaatgataaaaacacataacaaaaaaaaaaagtgaaaaatggcgagcgcagtggagaaggagggtggcgcgagccaggaaactttgtctttggagcttcctgctccacctggttggaagaagcagttcattccaaagaaagctggtaccccaaagaaaaacgagattgtgttcactgcaccaacaggagaggag

SEQ ID NO: 82834 - DNA, 251 bp, Glycine max
  Clone ID: 700957825H1
gaagaaccctaaccatctccgcagcgcaagtcctcattgcaacccaccaaactatcaactgggatcgtaaccgctctctcgccctcgctagatttgattggatcggcttcctgcattcttggactcgggaatttggaccaaaaacagttccccaaatcttgctttttgtcttgttcttgtttctaagtcgttaatgtcagtgcagcgaagtaatctctggcaagttgattgtggcaggggagaggagggtt

SEQ ID NO: 82835 - DNA, 251 bp, Glycine max
  Clone ID: 700957827H1
agacaaggagttgtacagcaagacgtttttggacgaggaaaagaggaacaagttcataaggtggaggattcagtcgttggagaagagcgttagaagccttgacttctctccgaatgggatatcgacaatagttcaggtgaacgaccttaagaactctcccggactgggcaagagggaactgaggcaggccaccaatcaggcccttcaactgcttcaggacaactaccctgagttcgttgccaagcagatat

SEQ ID NO: 82836 - DNA, 255 bp, Glycine max
  Clone ID: 700957828H1
cattcagacttcccactttccagtatggcatgctgcataatcgtcaggctcaagactcaacctgatatggttcgcgctgctcttcgttgtcggattgttaacgattctcaaattggctttcgttgttttcagatgggtctacgtcaatttcctccgaccaccgaagaatctcaaaaagtacggatcttgggcagtggttactggacccactgacggcattggaaagagcttcgctttcgagctcgctcgcaaggg

SEQ ID NO: 82837 - DNA, 245 bp, Glycine max
  Clone ID: 700957829H1
acggggttgtttgagcctttcgtgactcatctcaaattcctcaaagattagatctgtataggtggatactcaattaagcttctgcctcccaaccacggtggcttctggttcaccagagccacgtttgagagatttgtgcgctttgtcagcacaccggctattctggagatgtttgttagccttgaaaatgaaattctgcagatcagaagttcatttcaagctaatgtcttttgcaatgtccgttg

SEQ ID NO: 82838 - DNA, 255 bp, Glycine max
  Clone ID: 700957830H1
aaggcaatgaatctgatgcaggcggttcgctacgacgcctacgggggaggtcctgccggcctcaagcacgttgaagttgccgttcccagtccaaaggcaaatgaggttttaatcaaactggaagcagttagcattaaccctattgattggaagattcagaagggtcttctccgtcctttatttctccccagaacctttccccacataccttgcacagatgtggctggagaaatagttgagatcggaactcaagtc

SEQ ID NO: 82839 - DNA, 136 bp, Glycine max
  Clone ID: 700957831H1
cgaataccaatatgtaaacccgaagacatctcatcagggaattggattactgttagatcaggctgaacacctgcaagtgttaatgtagatagacaattcaaatgtacagctttcagtaggaaacaaatagcttgtc

SEQ ID NO: 82840 - DNA, 262 bp, Glycine max
  Clone ID: 700957832H1
attttcatttgcaaaggaatcattttccatttgccaatcaaccttcttcatccctctagatcgaaaggccaaatttttctttttcttttcttttttcattattatttcatatttttttccccttttcaattcttcaaaaaattctcgcgactaaattcacgtcagtacacggaaacataaaattcagtttttttttattaaaatttgttggcaaacaaaaacaaaaaaaaaattgaaattttgatccgttttgccgaattgg

SEQ ID NO: 82841 - DNA, 256 bp, Glycine max
  Clone ID: 700957833H1
cgaggaggaatatttggcaagagtcaattggatgcatggaaatattctcactgctcagatcttgaacaggcaccacactaaaataaagattgttaagtttgatattagaacaggtcaaaggaaaaatatattggtggaagaaaacagcagttggatcaatatacatgactgtttcacacctcttgataaaggagttaccaaattttcgggtggatttatctgggctagtgagaaaacaggatttagacacctttat

SEQ ID NO: 82842 - DNA, 256 bp, Glycine max
  Clone ID: 700957834H1
cagtgcagcatctgagaaactaaaccccacaagaatcctcgcccctgcctcaccgtatacggctcagccactgcaacaggaagcatagttcgccgctactccgcgaccctaccctatcaattttcgtacttcttttcgtaattgcagcgaagaatggcgaagaggaaggagcggattcagaacccggagccattcgatccgtacggcgccgatcccgcgaagacgaagaagcgttcgaagccgccgaagcggtacc

SEQ ID NO: 82843 - DNA, 251 bp, Glycine max
  Clone ID: 700957836H1
aaggctttcgacattattgtgtctcttgatgtgtggaaatttgtgagaaatcgagacaccgtacttgaaatgctgaaggacaaaatcaaggaggaggcattgaggacatacctctttaccttctcttcatcttatgaatcgttgagcctggatcaactcacaaaattttttgatctctctgtttgtcgcactcatagcattgtcagtaggatgatgatcaatgaggagcttcatgcaagctgggatcagcc

SEQ ID NO: 82844 - DNA, 252 bp, Glycine max
  Clone ID: 700957838H1
ctaaacgactctatctctcttcgttttgttcttccttgcgctcctcctcgttcgttcgttctccctcgcgtagatcggcaatggcgcagaccgagacgtttgctttccaggctgagatcaaccagctcctcagtctcatcatcaacaccttctactccaacaaggaaaccttccttcgtgaactcatcagcaacgcctctgatgctttggacaagattagatttgagagtttgacggacaagagcaagctcg

SEQ ID NO: 82845 - DNA, 252 bp, Glycine max
  Clone ID: 700957840H1
caactagaaacagtgtgatgaaaatgaaggtccttgttttcttcgttgctacaattttggtagcatggcaatgccatgcgtacgatatgttccctctccgaatgaacactggctatggtgcccgtactccggaggtgaaatgcgcaagttggaggcttgctgtggaagcacacaacatctttggctttgagaccattcctgaagagtgcgttgaagcaacaaaggaatacatccatggcgaacaatatagat

SEQ ID NO: 82846 - DNA, 252 bp, Glycine max
  Clone ID: 700957841H1
aaggcttttgacattattgtgtctcttgatgtgtggaaatttgtgagaaatcgagacaccgtacttgaaatgctgaaggacaaaatcaaggaggaggcattgaggacatacctctttaccttctcttcatcttatgaatcgttgagcctggatcaactcacaaaattttttgatctctctgtttgtcgcactcatagcattgtcagtaggatgatgatcaatgaggagcttcatgcaagctgggatcagcca

SEQ ID NO: 82847 - DNA, 253 bp, Glycine max
  Clone ID: 700957842H1
ctttttctctattgaggttgtcattgggagcactcaacctaaccattcaagttataaaaccacatcgcaagaaaattcacaagcgatggatccgaagctgaaagaggtttctcagctcttcgatcgcttcaagacttcgtttctccggaacgacttcgataactgttccaatctcctttctcagctaaaggtgttacttacaggtttcagaagcctgccaccgttgtttgcagatacacctaatgcagttcat

SEQ ID NO: 82848 - DNA, 251 bp, Glycine max
  unsure (1)..(251): unsure at all n locations
  Clone ID: 700957844H1
attccctgcacgagcttcttaatatagtaggattatgtcttccttcatcacactagacaagcatatagaagnccatcactgaactaacaaagcaaccctatgtcgaaggtggtttgtgtcaccggagccagcggcgccatcggatcatgggtggtcctactcctcctccagcgtggttacaccgtccatgccaccgtccaagatatcaaggatgaaaatgagacgaaacatttggaggaaatggaaggagc

SEQ ID NO: 82849 - DNA, 233 bp, Glycine max
  Clone ID: 700957845H1
ggctcgagcgaatctcgacgttgaactgaacgtggaggagcggaaaccgctttctgttgggtacaagaatgtgattggtgctcgcagaggtcctggaggatcctgtcttccattgagcagaaggaagaaacaaaagggaacgagttgaatgcgaacggattaaggagtacagacagaaggttgaattggagctatcgaacatctgtaatgatgttatgagagtgattgatgag

SEQ ID NO: 82850 - DNA, 115 bp, Glycine max
  Clone ID: 700957846H1
ctgcgactctctttccttccctctttttccgaatctgaatcgaaatggcttcggagactgagacgtttgcttttcaggccgagatcaaccagctcctcagtctaatcatcaacac

SEQ ID NO: 82851 - DNA, 257 bp, Glycine max
  Clone ID: 700957847H1
aggagatctgcggcctccttgagcagcagatttcgcattcttcttccgccgataaggctcagatttggcaacaccttcagcgctactcgcacctcactgacttcaacaattacctcgccttcatcttctcccgtgccgagggaaaatcagtggaggttcggcaggctgcggggttatatctgaagaataacctcagaaacatgttcaaatctatgcagcctgcataccaacagtatgtgaaatcagagttgctgcct

SEQ ID NO: 82852 - DNA, 258 bp, Glycine max
  Clone ID: 700957848H1
acttgatctctttggtgatgagacagaggaggataagaaggcagcagaggaaagggaggctgctaaaaagcctgccaagaaaaaagagagtggcaagtcttctgtccttctcgatgttaagccttgggacgatgagaccgacatgaagaagctggaagaggctgtccgtagtattgagatgcctggtttattgtggggagcatccaaactagttcccgtgggatatggtatcaagaagttgcagatcatgatgactat

SEQ ID NO: 82853 - DNA, 252 bp, Glycine max
  Clone ID: 700957850H1
ctcggttttaccaagcatggagcttcctacaactgatgtggaaccttagcctaagaagattgaacctgagaaaaacgaaggtcccttgttccattgtgatttttgtgatacagaagtagttcacaagctggctcaaatgttcctgccaggactagcctgtgcctgtgttgataacaccacaggcggtcccttcaagacccctggttcagtggctgttgatctgagaaaggtaatgatagaatttgtcaccca

SEQ ID NO: 82854 - DNA, 249 bp, Glycine max
  Clone ID: 700957853H1
caaagatgtctttgtcttggacgttgacgacactactctctctaatctccagtattttgctaaccatggatttcgtgtggaaccacacaatacgacggcgtttaagaactgggttcttgatggcgaggcattcgcactgccagagactcttaaaatgtacaacaaactgttggctctcggcatcaagattgtattcttatcagaaagaccactgagtctaggggatgtaacagccaagaacttaaagga

SEQ ID NO: 82855 - DNA, 249 bp, Glycine max
  Clone ID: 700957856H1
cgagctctgcggcggaaggagtatcaatggacgatgattacgaaaccttgattgcaaccaccgacgtggagcttctgaagagagcgtggcgcaacgagaaggcggccccagagattctccgctacgaatctaaattggtttcccgcgtcaacaaagtcattcaactcatggaagaaattgtggaggaaaaatccagtggcggtactgatcctctttcggtgtctctatatcagatggacttggatagaa

SEQ ID NO: 82856 - DNA, 250 bp, Glycine max
  Clone ID: 700957857H1
ctggaaagaaatgtgaggcaggcgtctcgagctctgaagcaagggaagactttaattgtatctggtttagctgaatcaaagaaagaacatggagttgaactgcttaacaagctggaagctggtatagatgagcttgaactgatagtacaggataggaatcgagatgcagttgcaccaaaacagaaagagcttcttcaatatgttggaggctgagatgttcctggggcattgcatttctgcagtgttgaag

SEQ ID NO: 82857 - DNA, 250 bp, Glycine max
  Clone ID: 700957859H1
agagagtgctggaacactgcaaagaccctacaacacaacagaaagttatggatgaaattttaggagcagttagcatgttggctcaggatcaatatggcaactacgttgttcagcatgttctggaacatgggaagcctcatgagcgttcttctataataaaggaattagcagacaagatagttcaaatgagtcaacagaagtttgcctccaatgttgtggagaaatgtttgacctttggaggtccttctga

SEQ ID NO: 82858 - DNA, 247 bp, Glycine max
  Clone ID: 700957860H1
actgaatcatgtggaaggataccttgaattgtcagcaaagacaaaaacctactttgccactgctgtgaacttatgggatgctgatttctatgtcaaagttgatgatgatgttcatgtaaatatagcaacactgggacaaactctagttagacatcgatcaaaaccacggatatacattggatgcatgaaatctgggcctgtcctatcccaaaaaggggtaaggtaccatgaacctgagtactggaag

SEQ ID NO: 82859 - DNA, 250 bp, Glycine max
  Clone ID: 700957861H1
atttctccatttccattttcactctcactcttcaagaatcgtaagctatcggaaagtcttacccaactgtgagtgctgattaccagaaggccgttgagaaggcgaagaagaagctcagaggcttcatcgctgagaagagatgcgctcctctaatgctccgtttggcatggcactctgctggaacctttgacaagggcacgaagaccggtggacccttcggaaccatcaagcaccctaacgaactggctca

SEQ ID NO: 82860 - DNA, 253 bp, Glycine max
  Clone ID: 700957863H1
gcaagctcatcctagagttttaaaaatggcagcagcctcctccatggctctctcttccccatccttggctggcaaggccgtgaagctgggcccatcagcccccgaagtcgggagggtcagcatgaggaagaccgtcaccaagcaggcctcctccggaagcccatggtacggcccagaccgcgtcaagtacttgggcccattctctggcgagcccccgtcctacctcactggcgagttcccaggtgactacggc

SEQ ID NO: 82861 - DNA, 258 bp, Glycine max
  Clone ID: 700957864H1
aaacaacccgatcttcacgcaaacctctgatcaatccacgattgattttcattttcaatgttattctcctttgaaacacttgccccgtagctgcaaaagctaaaacacttagtgaatgagagcaataatgggatctggaaatatacgaccttcttcttccggctgctctcacttgtctatctccgagctccgcgagaagcaccattgggagctagaaaatctgacactaacctcacaacctttcaaaacattgaaatt

SEQ ID NO: 82862 - DNA, 250 bp, Glycine max
  Clone ID: 700957865H1
cagaaaggtgctgttatgaaagctatctgtgctggttttgaagaaactactgaaccagctgtttgtttgagcagtgatgtggagacaaatgagtgtttggagaataatggtggttgttggcaggataaagtagctaacatcaccgcatgcaaggatacgttccgtgggagagtatgtgaatgccccctggtggatggtgtgcaatttaaaggagatggttatacaatctgtgcagctagtggacctgggc

SEQ ID NO: 82863 - DNA, 243 bp, Glycine max
  Clone ID: 700957866H1
ctataaataagcaaccttacaactcttctcaatcccatcaaatcgaaccctttttaaacgctctaatacaaatttctggcaccaaatccttcccactctcctcaattccattcatttcaactcaacaatttctcagatccgtcaaacaaaataaaaaagatcgaaaaccctagttctataaatatataaaggaaaaaaggtctgatagatacccattgtcaatatgatctaattcttcacaca

SEQ ID NO: 82864 - DNA, 248 bp, Glycine max
  Clone ID: 700957867H1
aagagattagatagcctcaactcaagtaaggactagctctttgagaaaatcgtatcttacaccttttggtgaccactttgagtgagagaagagaaattaagagagatactcaaattagattcaagagagatggccatcaaccatgaaacttgggctttcattttcggtcttctaggcaacgtgatctcctttatggtgttcctcgctccattaccaactttttaccaaatctagaagaaaaaatctac

SEQ ID NO: 82865 - DNA, 204 bp, Glycine max
  Clone ID: 700957868H1
cagaaactttggatgaacctgatggaaagctttcttatcaggaacttggaattgcgaactttctggttttcgtgaatggcttgctctccatccaatcattgcagaatcagagaatgcttcaaaaatgataatttttgctcatcaccacaaagttcttgacggagtacaggtgtttttatgtgagaaagggataagttttgtgcg

SEQ ID NO: 82866 - DNA, 247 bp, Glycine max
  Clone ID: 700957869H1
cttctgcacaaatttgcgccatcgtccagagaagcgtgagacacttcgcgtttatgatgagagctaagatagtttagttgtcaagtcataaatcagtatcatcactttaaatttcattagaagctgtcaaaatgtcacggaagggtttgatggagcaagacctgagtaagttggatgtaacaaagttgcatccactttctccagaagtcatatctcggcaggctactattaatatgggcactatagg

SEQ ID NO: 82867 - DNA, 205 bp, Glycine max
  Clone ID: 700957870H1
ccgcagtttctccactccatgcctcccatgggctacaatgccaggaggggaagacttcacgtcttcttctcatccaagggttgagattgttggtggaagtgaagctcctccagtgcatgctctagttgttgaggttgccatagccatggcctcaggtgttcatcctatacccctcccaagtggcctaggtggtgcctatgttttc

SEQ ID NO: 82868 - DNA, 247 bp, Glycine max
  Clone ID: 700957871H1
atcacagcttagcccgtgctgatttcattttctgttagagtatacttatatcttgaccaaaattgcttaaaccataaacatttaacagcctcattttggataaattattagggttttagcatgtctctctaaatatttgattgtttcttggcgtactgttggttttttagttcatttttggatggtttattgggtactttgatagtggtcactaaaatttggagcattaatggttttcctctcacct

SEQ ID NO: 82869 - DNA, 204 bp, Glycine max
  Clone ID: 700957872H1
aggaaatatatttattaagaatttggatagggcaattgaccacaaggcattgcatgataccttttctacatttggaaatatcctttcgtgcaaggtagctacggattcatctgggcaatcaaaaggctatggctttgttcaatttgataatgaggaatctgcccaaaaagctatagagaagctgaatggtatgctgttgaatga

SEQ ID NO: 82870 - DNA, 247 bp, Glycine max
  Clone ID: 700957873H1
gtggaaagaaatgtgaggcaggcgtctcgagctctgaagcaagggaagactttaattgtatctggtttagctgaatcaaagaaagaacatggagttgaactgcttaacaagctggaagctggtatagatgagcttgaactgatagtacaggataggaatcgagatgcagttgcaccaaaacagaaagagcttcttcaatatgttggaggctgagatgttcctggggcattgcatttctgcagtgttg

SEQ ID NO: 82871 - DNA, 203 bp, Glycine max
  Clone ID: 700957875H1
agagagtgctggaacactgcaaagaccctacaacacaacagaaagttatggatgaaattttaggagcagttagcatgttggctcaggatcaatatggcaactacgttgttcagcatgttctggaacatgggaagcctcatgagcgttcttctataataaaggaattagcagacaagatagttcaaatgagtcaacagaagttt

SEQ ID NO: 82872 - DNA, 206 bp, Glycine max
  Clone ID: 700957876H1
actgaatcatgtggaaggataccttgaattgtcagcaaagacaaaaacctactttgccactgctgtgaacttatgggatgctgatttctatgtcaaagttgatgatgatgttcatgtaaatatagcaacactgggacaaactctagttagacatcgatcaaaaccacggatatacattggatgcatgaaatctgggcctgtcctat

SEQ ID NO: 82873 - DNA, 247 bp, Glycine max
  Clone ID: 700957877H1
atttctccatttccattttcactctcactcttcaagaatcgtaagctataggaaagtcttacccaactgtgagtgctgattaccagaaggccgttgagaaggcgaagaagaagctcagaggcttcatcgctgagaagagatgcgctcctctaatgctccgtttggcatggcactctgctggaacctttgacaagggcacgaagaccggtggacccttcggaaccatcaagcaccctaacgaactggc

SEQ ID NO: 82874 - DNA, 79 bp, Glycine max
  unsure (1)..(79): unsure at all n locations
  Clone ID: 700957878H1
aatgggtttcctctcaatctcttcttcctcccacacacgacaaaatacaanatcctctcctcggattccccgtcaaact

SEQ ID NO: 82875 - DNA, 252 bp, Glycine max
  Clone ID: 700957879H1
gcaagctcatcctagagttttaaaaatggcagcagcctcctccatggctctctcttccccatccttggctggcaaggccgtgaagctgggcccatcagcccccgaagtcgggagggtcagcatgaggaagaccgtcaccaagcaggcctcctccggaagcccatggtacggcccagaccgcgtcaagtacttgggcccattctctggcgagcccccgtcctacctcactggcgagttcccaggtgactacgg

SEQ ID NO: 82876 - DNA, 255 bp, Glycine max
  Clone ID: 700957880H1
aaacaacccgatcttcacgcaaacctctgatcaatccacgattgattttcattttcaatgttattctcctttgaaacacttgccccgtagctgcaaaagctaaaacacttagtgaatgagagcaataatgggcgctggaaatatacgaccttcttcttccggctgctctcacttgtctatctccgagctccgcgagaagcaccattgggagctagaaaatctgacactaacctcacaacctttcaaaacattgaa

SEQ ID NO: 82877 - DNA, 249 bp, Glycine max
  Clone ID: 700957881H1
agaagaagcagaaagagaagcattagcaaaagcaagaagaactagtctaagcagaaatggcctcttcagtgatggcatctgtggccctcaaacctgcccctttcactgttgagaagtcctcagttagaggccttccctccctctcaaggaactcctcttcattcagagttgtggccagtggtggcaagaagatcaagactgacaagccttatggaattaatggtggcatggctttgaggcaaggagttg

SEQ ID NO: 82878 - DNA, 72 bp, Glycine max
  Clone ID: 700957883H1
tatactacaacgagagcaaagcttcgtagcatagcagcagccagcagcactgggagttccaagttcggcgtc

SEQ ID NO: 82879 - DNA, 243 bp, Glycine max
  Clone ID: 700957884H1
aaggccatgtcggaggtttacttagggaagcaaatctgcaacgtggtggcgtgcgagggaatggaccgcgtggaaaggcacgagacgctgaaccagtggcggaaccggttcggttcgaccgggttttctccggttcacttgggttcgaacgcgtacaagcaggccagcatgttgctatcgcttttcgggggtggggatgggtatagagtggaagagaacaatgggtgtctcatgttgggatgg

SEQ ID NO: 82880 - DNA, 245 bp, Glycine max
  Clone ID: 700957885H1
cgcgtgcatagcagagtcagagacagagacgcagccatgaggcggagacctgcgaggtgttataggcaaattaagaacaagccataccccaagtcacgtttctgccgtggtgttcctgatcccaagatcaggatttatgatgttggtatgaagaagaagggtgttgatgagtttcctttctgtgtccatctggttagttgggagaaggaaaatgtttcaagtgaggccctggaagctgctcgcat

SEQ ID NO: 82881 - DNA, 205 bp, Glycine max
  Clone ID: 700957888H1
acactcttttaagatatttttgttacatagtttatggtctacgagagccctgcctctgtagagtgtagaccaacctccttttctttgctttgagctcgctcgatcttcttccatttcatgtcttgttttattttattttatttatttaagccttttaaatgcccaacatttcgttcttgatgtttgagattgatgtattcaattc

SEQ ID NO: 82882 - DNA, 245 bp, Glycine max
  Clone ID: 700957889H1
attgctgatggctacaacaatggtactgctttgggtgctgagattattggtaccttcgttcttgtctacactgtcttctctgccactgaccctaagaggaacgctagggattcccatgttcctgtactggcgccacttcctattggatttgccgtgttcatggttcacttggctacaatcccaattactggtactggcattaacccagcaaggagtttcggagcagctgtaatctacaacgaaga

SEQ ID NO: 82883 - DNA, 245 bp, Glycine max
  Clone ID: 700957891H1
attgagtttggtaagctagagcttgaggctgtgctcttcgacatacgggcaattttggatgatgtattgtctctattttctgagaagtctcaaggaaaaagagtagagttggcagtttatgtgtcagatcatgttcctgaattacttataggtgatccaggaagatttcgacaaataattaccaatctcatgggtaactcaattaagttcacggacaaaggacatatttttgtcacaatccatct

SEQ ID NO: 82884 - DNA, 246 bp, Glycine max
  Clone ID: 700957892H1
ctcactcacaaacgcacactgaattcaaaaacatcgaaagagagaggcatggccgagcaaaccttcatcatgatcaagccagatggcgttcaaagaggccttattggcgagattattagcagatttgagaggaagggtttttacttgaaagggttgaaactcgttactgtggaccgtccttttgctgagaagcactatgctgatttgtctgcaaagcctttctttagtggtttggtggattacatt

SEQ ID NO: 82885 - DNA, 60 bp, Glycine max
  Clone ID: 700957893H1
ggaagaataaaataaaaccgtactctgatccaaccttttttctcccttctttcttcataa

SEQ ID NO: 82886 - DNA, 78 bp, Glycine max
  unsure (1)..(78): unsure at all n locations
  Clone ID: 700957894H1
agagcataacaacaacaggtcagggagcgggttttcttcttccacccttttttaatttctnctctctcttctctgaag

SEQ ID NO: 82887 - DNA, 252 bp, Glycine max
  Clone ID: 700957895H1
actttggtgagggatccaacacccatcagcgtaatacttctccaactccacttatctgtgcggtgcccccaactcaacatgctgttgttagtctttcttccttcctcatttgctacgaatagacttttcatgtcttcatctttcatctagttttcttgtctttcctgttacgttgttttaggtctcaacacctcaaagcaaagtaggtagaagaaactggaccttggtttaattaaacttggcttctgcaag

SEQ ID NO: 82888 - DNA, 269 bp, Glycine max
  Clone ID: 700957902H1
gaagagaggaagttttggcgtttgaatctatagaatagaatcaaaccaaattgaaagaagatcgatcgatcgatcgatggctctggtcggagttgaagtgaagcatgcggcggagggcgcaccggaggagaattgctccgccaagcccaccaagcagggcgagggcctccgccactactattctcacaacatccacgagcatcagctccttctccgtcaaaagacgcataacctcaaccgtcttgaggctcagagaaacgagctcaatt

SEQ ID NO: 82889 - DNA, 202 bp, Glycine max
  unsure (1)..(202): unsure at all n locations
  Clone ID: 700957903H1
gaaaacctgagcaaaaaacaaaacaaaacagtaagctaagcttcactgccatgccttcaacgccattctcgtgttcgatcctcactcttctancgctcttcaactcctacgttaaccccatcttccgttcactcaccttccaactctcttcttcgctgctcccattcaatgccaacttctccagcgtcagactccactcttc

SEQ ID NO: 82890 - DNA, 264 bp, Glycine max
  Clone ID: 700957906H1
cattaatttgatattggacatgaaggggaattactatccacttaaactggctgcacgatgatgtacctggattatattttggatctaatgtaggatttcaaagaagccatagcaatctaccctgacttgagtaacgtaagattgaaagatttggaattactacttcaagatgttgtagctgctaaatagaagatttgcttgtgccttggaaatgttgctattttagctgccctgcagtggtttctatcgggaaaatggattgac

SEQ ID NO: 82891 - DNA, 264 bp, Glycine max
  Clone ID: 700957907H1
atccaattgaaattttaaaaatgactgggataaacttaagaattcaattattgaaattgaataagtagacaatttaattggattggtcgaatggtatcaaaaaaatggagtactaactcccatttcttatttattattgaattaaccgatcaacttgctttgttatcgaacatttctttttgatttcaaaaattttccggaaaaaatttgaatctatttttatatgcgaatcaatcctactacttctggtcctgaggtttctgc

SEQ ID NO: 82892 - DNA, 166 bp, Glycine max
  Clone ID: 700957908H1
agaagattgagactttgatgtgtatagtttaaatgtagcaaactcgagctaaaatctgcaattctttgactcgtaggttttcttgatcgtcagttcataaatttaattttgttgggaatgaattgattgtaaatctcacaaaagtgattggatgcattgttgatgt

SEQ ID NO: 82893 - DNA, 263 bp, Glycine max
  Clone ID: 700957909H1
ataaactaagagaagctaatccaggaaatgcccttcttgagttgcgtggaaatgcaggaagccacgatcttgctttatctgttgaaactctactggctttaaccaaattgacaagagaagttgctaaaggcggattgcctgttgatgatgcagtctgcattcaatgggagaggtgatcgtgctgatccttcaaggtggccagaagttgaaggcccgatgacggttgtgttgttcgaaggttggatgcttggtttcaagcccct

SEQ ID NO: 82894 - DNA, 259 bp, Glycine max
  Clone ID: 700957910H1
cttcaactcatctgcttcccctagcaaccttcttcttactactctccgcttcttatctccagattgctggggcgcaagcacaaccgttgactagtctcaagcttaactctcatattcttcaggagtctactgctaaagagattaatgaaaatcccgaggcaggatgggaggctgctataaatcctcgtttctccaattatacagttgaacaatttaagcgccttcttggagtcaaaccaatgcctaagaaggaacttag

SEQ ID NO: 82895 - DNA, 260 bp, Glycine max
  Clone ID: 700957911H1
caatataattcgcttcaaggaggtggttttgacccccacccatttggccatagtgatggagtatgcggctggaggagagctctttgagaggatatgcaatgctggcaggttcagtgaagatgaggctagatatttctttcagcagctgatttctggtgtacattactgtcatgccatgcaaatatgtcacagagatttgaagctagaaaatacccttttagatggaagccctgcaccccgcctgaaaatttgtgactttg

SEQ ID NO: 82896 - DNA, 258 bp, Glycine max
  Clone ID: 700957912H1
accaccaccaccacctttgttttgtagagatcgaaataatcaacaacaaggatttaaaaaaccatcggcaaccgtgatttgagttataacatcaatttttttcaactgtcctcaaccacaattgaaatcacatcgggttgcatttgttcgtaatttatcacgatatcaataaacccaaccaaaccgttatgcaactgtaaccgatcaacaagttaagagagggggaaatgagggtatttaaaagagccagtggagcca

SEQ ID NO: 82897 - DNA, 253 bp, Glycine max
  Clone ID: 700957913H1
actcaagttacttagaaaattccatcgattgggtaccacgcatcaaagaaattcgattaaaggacttgcctagcttcatgagaaccacaaacccacaagatctcatgatcatggatttcatatatagccagtgtgagagagctcaaaaagcttcagcaatcattgtgaacacgtttgatgcattagagcatgacgttttggatgcattctcatccatattgttgcctcctatctattccattggccccttaaa

SEQ ID NO: 82898 - DNA, 258 bp, Glycine max
  Clone ID: 700957914H1
ccttgggctttgtcaagggtattgtggattccgaagatctaccactcaacatttcaagcgaaatgttgcaacagaacaagatcttgaaggtcatcagaaagaacttggttaagaagtgccttgagctcttctttgaaattgcagagaacaaggaggattacaacaagttctatgaggctttctccaagaacttgaagccaggtatccatgaggattcacagaacaagggaaagattgctgaattgctcaggtaccact

SEQ ID NO: 82899 - DNA, 266 bp, Glycine max
  Clone ID: 700957918H1
cgacgaaccaggtgacgaagaagagttcaggaggcgcacccgaagtgcgtcaggggggtggaggtgcaaggagagggctatgcgaggcagaagcttctgtgagaggcattttctgtaccagcagcagagaaataggagtgcgaagaagaaacgtgcttctgggggtgttggtgtgccccagaaaagaggaatgaaacaaagaaaaaaacctgaaggtgatttggaaaatggggttgtgggtgctggagttgttggcgccgatggtg

SEQ ID NO: 82900 - DNA, 265 bp, Glycine max
  Clone ID: 700957919H1
attttatgttctcattccataggataagaacgatgaaacagattttatattaattaatgtattttatttgttgaattaatttttggaattgagttaaataagaagtcatattcacatataaaacttggatacaattaattcaataagtagggccaggttatttaattatatttgtgcatatacgatacgtgtgcgtatacgtatacgcgcgtgcagaacatctttatagcaggaacagacccgagttccgcgacaatagtttggg

SEQ ID NO: 82901 - DNA, 87 bp, Glycine max
  Clone ID: 700957920H1
atcgcgtttggcgatcgataacagcttcctcacacttcattacagcttcgatttcatcgttactcgttttgattccacacaacatac

SEQ ID NO: 82902 - DNA, 220 bp, Glycine max
  Clone ID: 700957921H1
gagaaaaaaagaggaaagttctgaaaaaattgaactccgacaattgcttttctcagcaactcttacttcatagaaaatatagctatagaggaagttggccaacggttaacttccctccgaacctagagagagtagtagtctcttgtaatcaaagcaaagttcagtagtcgattcttggtcaccttctgagactctaacttcaccttcctgacataccctt

SEQ ID NO: 82903 - DNA, 263 bp, Glycine max
  Clone ID: 700957922H1
caaatttaaagaaatcaacacacacaaacacatcaacatatggatatagtaagggtgcaaaccatagcttccaaatccaaagatgctgccatcccagccatgtttgttagggcagagacagagcaaccaggcatcacaaccgttcaaggggtgaaccttgaggtgccaattattgattttagtgacccagatgaagggaaagtggtgcatgagattttggaggcaagtagggactggggcatgttccaaattgtgaaccatga

SEQ ID NO: 82904 - DNA, 263 bp, Glycine max
  Clone ID: 700957923H1
cttccctccaaaccttgtgagtcccttcgaatcaaagcaaaacttagcagttcgattcttggtcaccctctgagacacaacctctgcttcctgacatatccttcacgccaatcttcccttcctcctcagactatatacacttcatcatctctatcccctcttcatattttttctattcttaacctttctctacagtatgtgtttgctgaaaggatcatgttattgaagctttttgtgatatttgtctgattatgttgctagga

SEQ ID NO: 82905 - DNA, 264 bp, Glycine max
  Clone ID: 700957924H1
atttcaatccccagtttcttcttcaacgtcctcttacgagcagatcccaattctccttcccagtttcaaaccctaattccctcattcccatggcctcagaagagcccactgtcgcggtggaacccgctcccgaacctgccaccgccgagcctcccccggaggagaaggaggagcccaaacctgaagccaaggctaagaaaaccaaggaacccaaacctaaaaaggtttccagaccacgcaaccctcccactcatccttcctacg

SEQ ID NO: 82906 - DNA, 224 bp, Glycine max
  Clone ID: 700957925H1
cacaaactctctctgactagtgatatctatccatggaggccaagaacttgtggcgcttcctggttctttcaatcggtgtggtactagttttacttgtcacttggctgcccaacaaggaggctctagactgcaacctttactctggatggtgcacctcaaagaaccggttctactcttcagcacatcctaataatccgattaagaaaccatcattttccacacaa

SEQ ID NO: 82907 - DNA, 256 bp, Glycine max
  Clone ID: 700957926H1
cagggttctcagcagccacagttggtgcttgccgagaagctattccttctccgacaacccgttgaagtcattgacaaggttcgctacaaggaggatgttttcactcacatcaaggaatacgagatggtccctttgtacgagaccctagtcgccgattccgtgttggacttggatcgtgcccttttggacttcatgcgcgctaaaattgaagacgagctcaccaagctcgacgaaaagattgctgatgctgaggaaa

SEQ ID NO: 82908 - DNA, 258 bp, Glycine max
  Clone ID: 700957927H1
gggagctttgtgctagaattgcagcagagggctattgaattcagttcgattatttcaaagcatcaaaatattaggtctacacttgtagaaaggctgccagttttggatgaggcaacttacattggtaggagggctgggttgctgccaggcgcagcttcaactccaactgcaccttcatttaatcttccaaatggagtagccaaacctgtggctcctcttgtagatctacttgatctaagttcagatgatgctcctgct

SEQ ID NO: 82909 - DNA, 94 bp, Glycine max
  Clone ID: 700957930H1
gtcttcaatcgaaaagctcctagaaagtggtcgtcccttccttcgcggtgatctggagtccatgcgacaagaacttacctcggctggttggcgt

SEQ ID NO: 82910 - DNA, 252 bp, Glycine max
  Clone ID: 700957931H1
gtgtattggtcactgacctatcttggaagagttttgaagtttaaaccttcaaacccttttgcctttagattctgattctgagtctctgctgctatatatggcgccacgcgtatttcttgtgttggggatgttgctgatggtgtgccttgttaaggtttcgtctgatccaaagagagaagaagaaatactggaagaagaactacattttcccgataacgagccacttattgtgagagacgggaacagaaggct

SEQ ID NO: 82911 - DNA, 217 bp, Glycine max
  Clone ID: 700957932H1
cacacaaactctctctgactagtgatatctatccatggaggccaagaacttgtggcgcttcctggttctttcaatcggtgtggtactagttttacttgtcacttggctgcccaacaaggaggctctagactgcaacctttactctggatggtgcacctcaaagaaccggttctactcttcagcacatcctaataatccgattaagaaaccatcattt

SEQ ID NO: 82912 - DNA, 175 bp, Glycine max
  Clone ID: 700957933H1
cttccatcagatatattttagacaaaaacaatggcaggcgaggtggtgaagaaggaagactctctcaacctgaaagtcactaacaagagtcatgttcaacctgaggagaaaattggaaggaaagagtaccagctggtcacttttgatcttccctacttggccttctactacaacc

SEQ ID NO: 82913 - DNA, 263 bp, Glycine max
  Clone ID: 700957934H1
tgcgtctttcattttcacactcaaccctttcttcatccttttatctcgtctctgccaaaacgatgccgtttgctctggagaataacggaggagttacgatcggacggtcctccttcgcttactgcgtcgcgatctgcgatcgtgattttccggaggatgattccgactccagctccgactcctccatcggaaggaacagcatctcgtcggaagattcctccgaccgggaagacgccgtcgaagttgaggttcagagttccttc

SEQ ID NO: 82914 - DNA, 261 bp, Glycine max
  Clone ID: 700957936H1
cagttagtacaaaaaagggttacttcagcttccacatatcttgaagaatagatcaatgggcaagtctgtagttgagaagctactttggatggcaattgtgtgcttggtgctgggtgtaatttccattatccccaaggcccaagcagcagtgacatgcaaccaggtggtgagcaacctcaccccatgcatttcttatgtgctcaatggtggcaaaaccgtgcctggcccttgctgcaatgggatcaagaccctctttaacct

SEQ ID NO: 82915 - DNA, 262 bp, Glycine max
  Clone ID: 700957937H1
actcaacaagcttcgaaccaaatcttattgagaaaatgtctggtcgtggaaagggtggaaagggtttgggaaagggaggtgccaagaggcacaggaaggttcttcgtgacaacatccagggcatcacgaaacctgcgattcgtaggttagcgagaagaggtggcgtgaagaggatcagtggtttgatctacgaggaaaccagaggagttctgaagatattcttggagaacgtgattcgcgatgctgtgacctacactgagca

SEQ ID NO: 82916 - DNA, 261 bp, Glycine max
  Clone ID: 700957938H1
ctgccttatctgctgttctagtttattggcattgggatcagtaactgcaattcccaatgcaaattttcaacgggcgccaaggagcactagtgtgcttctggttgttgtctgtgttttctgtggtaacaggattcaaccatgaagagcacaggacagtggaggtagttggcctaggagaatgcgcagactgcaggcagaacaatattaagaataaccacgctttctcagggttacgtgtgacggtagattgctagtcacgac

SEQ ID NO: 82917 - DNA, 261 bp, Glycine max
  Clone ID: 700957939H1
tgataagagtgttgagagtttcaatgggaaaaaactcactcctacaggctctaggtattttggtggttccatatcagggcaatttgattgtgaaagagatccaaagcagtttggctcctcagttgtcaatatgagaaaagatgtcagaagtgagattgatgtgcttccacacgtcagaaaaaagaaaaagcaggcatcaatgtctgtcagaagcatatcgactagagaaaatatccacaccttactaaggcgagccaaggt

SEQ ID NO: 82918 - DNA, 260 bp, Glycine max
  unsure (1)..(260): unsure at all n locations
  Clone ID: 700957941H1
cctcactcgcatttgaagacgcagcaatctttcccgtgaaaagggaccatggaggcaaattcaggtgccagcgaccgaatttcgagaatcgccggccacctccgcccccagagagaggatgatgtttgtttgaagcgtacgngttgccgtgcaaaaggtggggtctccggattcaaggtggccatattgggtgccgcaggaggcatagggcaacctctggcgatgttgatgaagatgaatccactcgtttcacttctcca

SEQ ID NO: 82919 - DNA, 255 bp, Glycine max
  Clone ID: 700957946H1
attgggagctctcgttgtttcggagttagggaccttacgcagccatggccactgctacgaatgccgccgccgccccaccacgccagctctcccagaaggaagctgacatccagatgatgttggccgccgacgtccacctcggcaccaagaactgcgacttccaaatggaacgttacatcttcaagcgccgcaacgacgggatttacattattaaccttgggaagacgtgggagaagcttcagctagcagctaggg

SEQ ID NO: 82920 - DNA, 253 bp, Glycine max
  Clone ID: 700957947H1
cttcgagtaacaaagcaccagtttcttcatcattggatggtctctcatctctttcactttcgacaaaatcaacttcaaatgctgctcctatgatgaatttattggatggttttgcccccagcccgccaacagaaaacaatggatcggtttatccatcagtaactgcatttgagagcagctccttgaggttgacattcaatttctcaaaacaaccaggaaacccacaaacaacagttatccaggctacttttat

SEQ ID NO: 82921 - DNA, 250 bp, Glycine max
  Clone ID: 700957948H1
cttttgtgccaatgatgctttcacctactcaaggagtttctacccaaagttctgattggaatggatatcaggcatctgtctacttacctgagaggagcattcatccaccttctacatttgtcatgaacaacccagcaattgatacaaatgtttacatgcaccatcaaaagcagatgcctgttgatgagtttccagaaaggcctggtgaacctgaatgcagcttcttcttaaaaactggggattgcaagtt

SEQ ID NO: 82922 - DNA, 261 bp, Glycine max
  Clone ID: 700957952H1
atttggatcactttccaatagcagtgctgggagcagtccaaggggggcagagaacaacaaagaaggtgccaccttgtgcaatgccttagaaagtacttcatacaagaagaagaagccccttgccctttgaaatatgatgaagccatgttggaggaggaagaagatgaaaaggactttgttcttttgacttcaattattagtgaagtttatatatatatggtaatgttagaatttggaaagatgtgttcgtgttcatgttca

SEQ ID NO: 82923 - DNA, 171 bp, Glycine max
  Clone ID: 700957954H1
ttgcatacaacatcggcaatttattttcatgacaatcattccgcttttgcctattatacaagtaactaaaagctttatcccaatgaggtcagttacattggatagctacgtagattgcattaatgcaattgagtttgaataaagaccaaaatttcaagaatactatttact

SEQ ID NO: 82924 - DNA, 249 bp, Glycine max
  Clone ID: 700957956H1
ctatttttgtttttctttgttcacagctctgcgagatcttcattcgccgattttaaaagatgggtaagcttcagagtgatgctttgcgtgaagccatttcaggaatcatggccgattccaaggagaagaatcgcaaatttgtggagaccatcgaactccaaatcgggttgaaaaactacgatccacagaaggacaagcgtttcagtggctctgtcaagctgccccacatccctcgccccaagatgaaat

SEQ ID NO: 82925 - DNA, 257 bp, Glycine max
  Clone ID: 700957957H1
tgcaactacaacaacattcattcattcacagctgtcacgccgtgaacggaaaatggcaacggcgagacgcagtttcccgcctatcaccgaatgcaacggaacgacaccgtgcgagtctgtggccgccgacctcgacggtacgctcctcatctcacgtagctcgttcccgtacttcatgctcgtcgccgtcgaagccggcagcctcctccgcggcctcatcctcctcctaatacatccgttcgtcatcatcgcctacc

SEQ ID NO: 82926 - DNA, 254 bp, Glycine max
  Clone ID: 700957958H1
cacaagtcatcagaggagagaaagctggagcttaggcttggtccacctggtgaagagtagatcaatgaaagcatcagaaaaagcaacagagaaagaaatgaatcacaattcactcttggttgcttctcaactcaaaatttttttacttctgacaagcaaggtccaggtgggactacgttgccctctgcatggccttccacatcctatcatcatgaacaccaggctaaagctaaagcttcatcatttcttcagct

SEQ ID NO: 82927 - DNA, 130 bp, Glycine max
  Clone ID: 700957959H1
atgaaatatctgattcagcactaaaagatgatcaaatggaatctctgttggaggaattaggttctgtttctgtcatgaattccaatcagagtgatctcgatttaaaactaggtacagttccacacaacat

SEQ ID NO: 82928 - DNA, 167 bp, Glycine max
  Clone ID: 700957960H1
tccgcatccgctagctcgcgcaggcaccagcaggtcagctccaagggtttcttttgttcttttctccttatccatccatatcccttaccaataatatcctattgttttgctttgttcggaaacgaaaccctaattttgggatcacaggtgaggttattgtgatttga

SEQ ID NO: 82929 - DNA, 253 bp, Glycine max
  Clone ID: 700957961H1
gcgaaaggcggactaggaggattatcattcatttcttcacatgtcctccaccttttcaagtctatgggtctctaccttgctgcaaaaccctgcagcccatgctgcagcgagttttgctgctacattttggccatatgcaaatgcagaaacttctgcagattctcccgtgtgcactccagattttccatcaagacaaattggctcgcctccaagtgtgacagctattgcagctgctacagtagctgctgcaact

SEQ ID NO: 82930 - DNA, 249 bp, Glycine max
  Clone ID: 700957963H1
ggatgagtacgtttaccatggtacatcatactgcaccgcatataccattcaaatactcagaagagtggaatgctgcgcaacacagcttaatggaactgttcattgtgattatcctaaatggatcgagatcctatgtcacgatattaatgtccatattccacaccacatatccccagaggataccaagctataatttaagagcagcccataagtctctccaagaaaactggggacagtatctgaatgagg

SEQ ID NO: 82931 - DNA, 250 bp, Glycine max
  Clone ID: 700957964H1
gagaatttgaattctgattttgtcggggattggtcttgccatttttgtggcagtgctttggtgaattacaggtgccattgagtattttgtaatctttctttgattataattattaaattaaagctggaggaggaagagaaaagtccgtaatactttcgtcactgttatattgatgtgggcctgttgtacataaaggatgagcaaattttggcctttttacatggataggatatctgaggcatttcctgaa

SEQ ID NO: 82932 - DNA, 255 bp, Glycine max
  Clone ID: 700957967H1
ctaagagcaagtgttccactgtgggtatccaaggcattgcttgggcttttgggggaatgatctttgctcttgtttattccactgctggaatctcagggggtcatattaacccagcagtgacgtttgggctgttcttggcacgcaagctctctctgacaagggcaattttttacataatcatgcagtgcttgggagctatatgtggtgctggtgtagttaaggggttcgagccacacctctatgagaggcttggtg

SEQ ID NO: 82933 - DNA, 262 bp, Glycine max
  Clone ID: 700957969H1
cggctcgagcgcaacaaaaagaaagaatcccaggcgaggagaaagatggaggggaaggagcaggatgtgtcgttgggagcgaacaagttccccgagagacagccgattgggacggcggcgcagagccaagacgacggcaaggactaccaggagccggcgccggcgccgctggttgacccgacggagtttacgtcatggtcgttttacagagcagggatagcagagtttgtggccacttttctgtttctctacatcaccgtct

SEQ ID NO: 82934 - DNA, 258 bp, Glycine max
  Clone ID: 700957970H1
caacggtgcacaggctggtttgacgtattggagtcctaatgtgaacattttccgtgacccgcggtggggctgtggccaagagactcccggcgaggacccgacattggccgcaaaatacgccgccagctatgtcaaaggactccaaggcgatggtgccggaaatcgcctcaaggttgctgcttgttgtaaacactacactgcctatgatcttgataattggaatggtgtggacaggtttcatttcaacgccaaggtgag

SEQ ID NO: 82935 - DNA, 258 bp, Glycine max
  Clone ID: 700957972H1
caaagaaagaaagaaagaaaaccctagcttaccttttcaactttcaagatgcaaatctttgttaagacactcactggtaagacaatcacccttgaggtggagagttcagataccatagataatgtaaagtccaagattcaagacaaggaagggatcccaccagaccagcaacgtctcatttttgctggcaagcagcttgaggatggacgtacacttgctgattacaacattcaaaaggagtccactctacacttggtg

SEQ ID NO: 82936 - DNA, 255 bp, Glycine max
  Clone ID: 700957973H1
gtcggttgtgctgcaagacaaaacttgcagtgtagtcatcactctccgtgagtgcaaaacaaccccacactgttccttttttatgcggcttgatgcattgctaggaaacaaaacaacaccttcattctatgccctcataaattaacattcagaattcccacttgtctctcttattctctgccaaaacttgttacaagtctttaatttccaggtcttctctttctctcatactacttcaaagttttgctgtgcaat

SEQ ID NO: 82937 - DNA, 252 bp, Glycine max
  Clone ID: 700957975H1
caaatcttagccgcagaggcagaggaggagatggagacgatgatgatgagttgcgtatcgattccgagttcaattccaaaatcaagaccttctattagcttgggtttgggaactcccaagttgttcaattcagtttcagtaagggtagccgtgaacgtgaatggtcggggaagaaacaaaggtttgagttgcaacgccatgttcggtctgggcgtgcctgaactggtcgttattgccggcgtggccgccctc

SEQ ID NO: 82938 - DNA, 251 bp, Glycine max
  Clone ID: 700957976H1
gtgagagagagagcgagcagtttctgacacagagagaggggtttgggattggagggattgacgctgcgtctcttcctcttctctttcgatccatccctcattcctaatcctccaatccaaccacctcagcctcacactcacatatacacatatctgaacgcgtatcgtccctcctatggcttcaaagcgcatcctcaaggagctcaaggacttgcagaaagacccaccaacttcttgcagcgctggtccag

SEQ ID NO: 82939 - DNA, 250 bp, Glycine max
  Clone ID: 700957977H1
atcaaacaaagtttcagtttttggtgttccatttttcttcctccatctttatcttaaacataacttgaactctccattccttaaattttagctacgagctagttccgacacagacaaagcaagaggcaaagaccgagttagaggtgactgttgagagcaagaacaaagacctcaagcacctggggtttgtgaggattgctgctattcaaacatttgtgattgtgtcaaatctgtatgagtacgcaaagca

SEQ ID NO: 82940 - DNA, 251 bp, Glycine max
  Clone ID: 700957978H1
cttcagttgccttcatcctcaagctgttcgcgtcggccatgtggtggtctcacacccaatgatgggtcgcacccaattccccttattaacgctcctactgtggaagaacaacaaagtgtggaaattgaagaagaagaagagaaagaaagggaaagggagagggatcagctttctattttgacccttttgattgctacgttcaggaaatctttgattgggtgcagcactactatatcttcttcttcttcaat

SEQ ID NO: 82941 - DNA, 146 bp, Glycine max
  Clone ID: 700957980H1
cacaagttctgtggtatcaaccaaaacacggtcatagggcagttggactttttccttagagagtgtcccaaagggatgaaaacaatgagcacgggattgttcttgagcacactctctttggggtctttctttagcaccttgttagt

SEQ ID NO: 82942 - DNA, 160 bp, Glycine max
  Clone ID: 700957981H1
gaaaccctttaatcccatttattgttgctttcttttgttccttcgcttagaaatttttattgatatattaagatgcaggagaagaggtaaccgtgtttgttcattcacctttcctaatcctagaacaaacaaacgaacgaacgaagacactgcaatctag

SEQ ID NO: 82943 - DNA, 73 bp, Glycine max
  Clone ID: 700957982H1
aaatgtctatcacttccctcaccatggccgagtcctgcctcctctcttctccctcctcagtcttccacaccaa

SEQ ID NO: 82944 - DNA, 258 bp, Glycine max
  Clone ID: 700957983H1
catttacaaacccatccccgacctcgtatttgtttttccaagcatggacctttccatcaacacacgcacatgatacacgctgcatcatcatcgctccgccggttgagatgttcccgccgccgccgcagacgaccctcccctccctgccggatctactcctcacggccctctccgtctgcttcctagtctcgtcctcgaagccccacatcggcggctccacccgctgccccttcccgcgtcgcttcctcaaaatccccg

SEQ ID NO: 82945 - DNA, 256 bp, Glycine max
  Clone ID: 700957985H1
cgcaacaaaaagacagaatcccaggcgaggagaaagatggaggggaaggagcaggatgtgtcgttgggagcgaacaagttccccgagagacagccgattgggacggcggcgcagagccaagacgacggcaaggactaccaggagccggcgccggcgccgctggttgacccgacggagtttacgtcatggtcgttttacagagcagggatagcagagtctgtggccacttttctgcttctctacatcaccgtcttaa

SEQ ID NO: 82946 - DNA, 255 bp, Glycine max
  Clone ID: 700957986H1
atctcattaacttgagtagagatctgttgtagacctgtagtttactagtgaaaaagtggaagatgggttcgaagatagcaatagtttctatgctggccatgctccttttgatctcctcggaggtgttagagttagctactgcgggtggtgggggcaaccttggtgttggtggtggattatcaggtgctggtcgtggtggctcccctcgtggtcgtggaggcttccctggtggtggtagttttcctgctggtgatg

SEQ ID NO: 82947 - DNA, 255 bp, Glycine max
  Clone ID: 700957987H1
tgttgaatgatccaactatatatatatattgatgtttcccagctggcacatatggttgatgtgtcatccggtatgcatgttgaaacagcttatgacatgctatttttagtattagtatactgggcagtatataccattgttaaaagctcaaacagctgatgacatgctatttttagtattagtatgcaattttgtatatagttagctactacaaattgttatttaattataagttatgcaaattcttatttaatt

SEQ ID NO: 82948 - DNA, 253 bp, Glycine max
  Clone ID: 700957988H1
gcagaggctgcgcagagtttgaactttgaacgttgaaggaacatagaggcagaggtttttcttctctcaccgtagaatcgaatcgagttcactttgatcgtgtgtgtctccgatcttcaaatccgcaacaaccatggtgaggggattgctcaacaagctcgtctctcgctccctctccgtcgccggaaaatggcagcacaaccaactccgccgcctcaacatccacgagtaccagggcgctgaattgatgagc

SEQ ID NO: 82949 - DNA, 252 bp, Glycine max
  Clone ID: 700957989H1
tcaaatctcaccatccacacagaaaaacacataaccaaaccctaatctgaaaccatcgttccctctctttctttctctctctttacattctttctctctctatcaacctccaaactccgatcccgtatttctctcctcgctacccgatccagaggcttcaatcctttccccgtcgagatcttgcttcacgcgcctccaacgctggaccacgcgcctgtttccgcctccatcatggtcgtgagcggagggaag

SEQ ID NO: 82950 - DNA, 250 bp, Glycine max
  Clone ID: 700957991H1
tgacccttttgggagctactggaagcccatttgtgtgcagggttcatattgccctcaagttgaagggagttcaatacaaatatgtcgaagaaaatttgaggaacaagagtgaactgcttctcaaatccaacatagttcacaagaaggttccagtgtttattcacaatgagaagcccatagcagagtctcttgtgattgttgaatacattgatgagacatggaagaacaaccccatcttgccttctgatcc

SEQ ID NO: 82951 - DNA, 249 bp, Glycine max
  Clone ID: 700957992H1
cgaagttctgattctgtatctgaaattggggatgaccttaacaaaactccagcctcagcacgacacaaaagaggctgtaattgcaagaaatcaagctgcctaaagaaatattgtgaatgctatcagggtggtgttggttgctccgtaagctgtagatgtgaaggatgcaagaacacatatggtagaaaggatggttctgttccttctggattagaagccgaacctgaagaagaaacagaagcatgcgaa

SEQ ID NO: 82952 - DNA, 251 bp, Glycine max
  Clone ID: 700957993H1
atcttcacaaccatatcatccccaaaacaaaaaaaatccacgtatttgaaatccgacgctcgtttttgatggatttagcgtgcaacgatgaaccacctaccgcgaatattcggcaatagaaagaagcaagcctccgacatggacccgacgaagaagaagaagaagagtaagaggaattcgacgaagagccgaaggagaaggagaaagaggaagtggaaattgcagtattagagagcgaggatcgagctagg

SEQ ID NO: 82953 - DNA, 247 bp, Glycine max
  Clone ID: 700957995H1
gatttttagggtggaagaaaaatcagagtgagagaaaaaatcgatggagatggaagtagacatcgagaagaagcaacaagacgtggtgaaagagaaagacttgttcaaagctgcagaagagggcgaggcatcaacgttcgaagctctctcttctgaaatcctctccaaagccctctctctcagaaacgaagacgctcgttcccttctccacgtcgcagcttcttccggtcactcccaggtagtgaag

SEQ ID NO: 82954 - DNA, 173 bp, Glycine max
  Clone ID: 700958001H1
aaataatctgtagcagcatccagagcaataggatttcgaataataaaaccatttcttctcctatgctagcaataacatatattgcacccatcgcactttgatgagaatggccacgttctttgcagtaatcagaggctcagagactaactcatccttctccattaattttatta

SEQ ID NO: 82955 - DNA, 202 bp, Glycine max
  Clone ID: 700958002H1
aagaattgcaaagaggagaggcaacgaaaagaggaggaagagagacaagctgcaaaagctgctttacaacagaagaaggtgaaagagaaagagaaaaaactcttgcgtaaggagcgagcacgtcttcggactctttcaggacctattttatcacagcatttacttgatatttctgatgatgatgtagaaaggctttgcatgt

SEQ ID NO: 82956 - DNA, 171 bp, Glycine max
  Clone ID: 700958003H1
tctcaagttggctgatgctcttgacatagctgtgaaatctgtgaggtacactcgtggaagcttcattttccctggggcacagtcttttcctcaccgcagtttttccgaggaggtttctgttcttgacagctatttcagcaaccttggttctggtagcaaagcatatgttat

SEQ ID NO: 82957 - DNA, 241 bp, Glycine max
  Clone ID: 700958006H1
gtcaggatttgttctatgctagactactcgatctggtatttcagattgttcctgcaaaacggaaaaagagattgctaaattggtattacaagtccaagccagttactattcaaaagagataggtaatttagaagcattgtaagtccaagcctctctggttattcaaaaatgtgtatctgtacagcaatatattgattgccataggtttctagtataaaatagctctctaggtattcaaaaa

SEQ ID NO: 82958 - DNA, 82 bp, Glycine max
  Clone ID: 700958007H1
ctttaattgtactactcatgagagagacttggcagttcggatacactgggtgctctcatgacgatttgtccaccaacagacg

SEQ ID NO: 82959 - DNA, 228 bp, Glycine max
  Clone ID: 700958008H1
ggcaagatgagtttgttaaaaagaggattggaagaatcctttgagtgtgggaaaatgagtatgtacggtagggatccgtggggaggcccgctggagattcacgccaccgactccgccacggacgacgagcgcaccggaatctccaggagctggaccgaggcgctttagacgagacccaacagagctgggctcttgggcgccggagaacagaaagagagcaataaaacc

SEQ ID NO: 82960 - DNA, 245 bp, Glycine max
  Clone ID: 700958009H1
gcaagagtaataattctgctcctgaagaattaaacatggaaatgagtgccagcaattgtgaacacagtgccgtgttttcctcattgccactggttctcaaatggcttagggacacggtgcaacaaaaccagtcaactcgttttcaggtccttgttactggttctatacatcttattggtgacatgttgaaattagtcaagaagtgattcgttgggctacttgaaagattggctttcattcagatt

SEQ ID NO: 82961 - DNA, 243 bp, Glycine max
  Clone ID: 700958010H1
catgttcccaccgtctagtaaacctagcaaagcaacaaaacggcgtcatgcttaggaagtagcatgcaatggtaatactagaaataggagggacatactgatcggccttggaggactctatggtgctacaacaagtctcacaagtaacaacactggttctgcatttggtgcttcattgtcgcctccagatccaactaactgcgttcaaccggacccagaagaagaccctttttgcacaccacc

SEQ ID NO: 82962 - DNA, 228 bp, Glycine max
  Clone ID: 700958011H1
acacactgtaagtaaatagaatcgaaatttagacaagacatcatgggtggggtaacatcgttactaatgttgctatgtctcttcgcaggggctatgtcccctgtgaagggtgaagacccttacttctttttcacatggaatgtcacctatggcaccctttctccagccggtgtgccccagcaggttattctaatcaacaatgaattccctggacccaacataaattcc

SEQ ID NO: 82963 - DNA, 236 bp, Glycine max
  Clone ID: 700958012H1
gttaaccatgaagtttatgtatctgcattcctacttctatttgttttctctagccaattcttgcttggaggagcagatgcttcccccagacaagtgattgacacagaaggcaagaaagttcgagctggcgtagattactatatccgaccggtcccaacaaccccatgtgatgggcgtgggccgtgtgtggttggaagtggctatgttctcatagcaaggtcatccaacaacacttg

SEQ ID NO: 82964 - DNA, 233 bp, Glycine max
  Clone ID: 700958017H1
agctcgagttcacagcagtttgagcatgatattcctgagcagtttcatcatgatgttcccgtgcttagttttacgcctgaacagacaaaggaggcccttgatgttgcaaggaatagcattgagcttctttccactgtgttgtcgtcttcaccacaacaagatgctttacaggatgatttgaccaccacacttgtgcagcagtgtcgtcggtcacagactactgtccagcgaat

SEQ ID NO: 82965 - DNA, 185 bp, Glycine max
  Clone ID: 700958018H1
aacaggaagaacgaacctgtgtaattcccccaaatccgaagttgatcctgaaaccctaaatagaccttaacgttgtgtctatgattgtgaattatggacgcgaaggatatcctgggattgcccaaaaactcattcccaactctcgagaagaagtctcgtcctcccaaagagtctcaaagaaaacc

SEQ ID NO: 82966 - DNA, 211 bp, Glycine max
  Clone ID: 700958019H1
caccactgaagctgctggaatcagtttgcttgcaggggcagtgggtcgttcccagttaagttacaaggggtgcagttgtcttccagcgatcagagaaaaattgaggaagtttcagtgtgaaattccagttttcaaattccaaccttgaggacaaggttgatttttaggaagggtgttgataagcataagcataagccacacatcaccaagg

SEQ ID NO: 82967 - DNA, 254 bp, Glycine max
  Clone ID: 700957317H1
cttccaacgctcctcctgcttctcatagccttcgccacctctgtctccggccgccgtgacctcgtcggagactttctccggctgccctccgaaactgataacgacgacaacttcaagggcacccggtgggccgtcctcctcgccggttccaatggttactggaattacagacatcaggctgatgtttgtcacgcctatcaaatattgaggaaaggtggtctgaaagaagaaaatattattgtttttatgtatga

SEQ ID NO: 82968 - DNA, 261 bp, Glycine max
  Clone ID: 700957320H1
tgcacgttgtaggctctttgtacgttttacacgtcagctcttcaaaacgacgcctccatcagatctctgcagccccaaagggtgccgttttgttgcgttgcactcgcggaagcggagaaaaccaaagaatcaagcttcgtcaaagtgtctgtcacacacagtctttaatttctggaagcgcttctcacttgctcacaataagaatttccctcaaatttcaatttttcatttgaaaataataaaaccctaaaagaggggttg

SEQ ID NO: 82969 - DNA, 259 bp, Glycine max
  Clone ID: 700957322H1
caattatctacttgtaagaagtccaatttcgggcaacaacgtttgtaatgcagaaataggtcattagcattgtaaatctccaggcgataaatggaatatcaaatggaagacgccgcatagcttctggtgtgacaatatcattgtgttgggcaaagcattttcgaagaaattacgtggatttaggaagattctgattattcttctacatctacaattattaaggtgaagataatttcggctctttacaagtaaagaatga

SEQ ID NO: 82970 - DNA, 262 bp, Glycine max
  Clone ID: 700957324H1
cgcccctataccagtggtcaaggaaatttttcgaactgatggcgaacagttcctcaagtatccaccacctaaagtgatgcaggtggataagtctgcatggatgactgatgaagaatttgctagagaaacgattgctggtgttaatccaaatgtcattaagattcttgaggagttcccaccacgtagcaagctagattctcaagcctacggtgatcatacctctataataacaaaacaacacttggagcctaacttgggtggg

SEQ ID NO: 82971 - DNA, 256 bp, Glycine max
  Clone ID: 700957325H1
ggaagttggaagtcatggcagcaacattgatggcagcaacaacaagttctggtactcttaaagcaactcctttccttggccaaggcaagggtgccaatgccaatgctcttagggatgttgtctccatgggaactgggaagtacaccatgggcaatgatttgtggtatggaccagacagagtgaaatacttgggacccttctcagctcagaccccttcatacttgaaaggagaattccctggggattatggatggga

SEQ ID NO: 82972 - DNA, 257 bp, Glycine max
  Clone ID: 700957326H1
tgggagacgaggttctgatgtgaaggtaattttattgggcctgttagttaatctacaactaattaattgggcctgttatttgaccgacccttaacctaaacaacaaaagcccagtcacaaaacccattagggttttccacgatataatagaaactgaaagcctcttacggttgcagcaacagcagcattcactgaaagcactcagtagggtttgcggtttcagagtttgtgacgcacgcatccatggccaccaccac

SEQ ID NO: 82973 - DNA, 256 bp, Glycine max
  Clone ID: 700957327H1
tgataacccataaccgaccgtaccaccgttttcctttgctttgcgttctacaatgtcgaaaacctcagagattcttacatgcaaagctgctatttgctggggaataggaaaacctgtgactgtggaagagatacaagtagaccctcccaaagccaccgaagttcgagtttagatgctttgtgccagtatatgctccacagacatctctactccgaaaaggattcccacataccaattttcctatagcacttggaca

SEQ ID NO: 82974 - DNA, 251 bp, Glycine max
  unsure (1)..(251): unsure at all n locations
  Clone ID: 700957328H1
attgattccgaagagaaaagaaaagatgtttgagccacaacagctatacacccgcgcgaagaccgaggacttcgacctcgaatcaggagaaaccctctacccagggctgagcgtcggcgagaaccagctccgatggggtttcatccgcaaggtctacggcatcctctccgcgcagatcgtcctccgcancctcgtccccgtcancancgttttctatactccaatcaatgacctcctcaagggcaattcca

SEQ ID NO: 82975 - DNA, 254 bp, Glycine max
  Clone ID: 700957329H1
gaaaccggtaaagggttgtggcttgattcgtcatcagagtgggttttggaaaaattgccgccacctctgaagcctaaacaaagtgtagatactgaaaggacactggtttcataagcaatggacagtgaagtagaaaatggagtcattctctttgttacacttccatataactttgcccgtgagaagttggctgctgagtatatttgtagagaactacgtgaggcagatgaaacaaatttgcttcaggaagaacg

SEQ ID NO: 82976 - DNA, 101 bp, Glycine max
  Clone ID: 700957330H1
gaagtgagggcctccgtcacactcacagtcagcatcgaagatcggaggcgaggcatgagttgtgtgctaactactactcttcaaaccaaacacgcatcgcc

SEQ ID NO: 82977 - DNA, 255 bp, Glycine max
  Clone ID: 700957331H1
aaaatacttggtgagcttatgcattgtaatttgaagcatggcaggttgctcaaataatgcgaccactattttgagtgtgaactggatatgaagcttgccttaggtttttaaaacactcatacctagacgaaatcccttgattcccaaaatatagaaactttggatacatgtattactgtctcttgcagggtagctaataacattctagaatctctaaccttggatatcttcatcactacaccaatgataccactt

SEQ ID NO: 82978 - DNA, 256 bp, Glycine max
  Clone ID: 700957332H1
gtaacatactaacatgttaatgcagatatttgtcagttgtaccatcttttagtttatgaactcgagcaggttgtccttgcatttggtgctgaaagtgatagaagtcttggtattccaggggagaacttgaaagggatacattcagctagagagtttgtttggtggtataatgggcacccatatggacaaaatcttgagccagacctaaagagcactgatacagctgtaatccttggccagggaaatgttgctttag

SEQ ID NO: 82979 - DNA, 262 bp, Glycine max
  Clone ID: 700957333H1
cgctttgagaaatcagacggcggagagaatgggtttatcactcttacggtgggttctgccgctgactctgttgctcacctgcgccctaggtttccaatcggacgaggcttctcctcgacgacgaagagttcggcatcgaaggaggacgaacctcctttgattccgattcgcatccaccttccaccgcctccacctcgaggaagaggctttccgactcctcctccgattccaagatccagttccctctccaacacgctttcgg

SEQ ID NO: 82980 - DNA, 259 bp, Glycine max
  Clone ID: 700957337H1
ctcaatggcatcatcatttgtgggtactttattacccaaccacttcacacaaaccaaacactcagctgttcctgcaagtagatcaggtgctccaagaaggaggagagtgcacttagcaacaacaagagcagagaccatgactactgtcatagaaaaactgggcattaagattgagaggaaccctcctgagtccaagctcactcaactgggtgttaggcaatggcccaaatggggttgccctccaagtaagttcccatgg

SEQ ID NO: 82981 - DNA, 88 bp, Glycine max
  Clone ID: 700957338H1
caacgaaacgcaacacaacacatcgtagtacggcattccgttcattgtttctttcaactcaactcaactctgtctcgcccaccacaca

SEQ ID NO: 82982 - DNA, 258 bp, Glycine max
  Clone ID: 700957340H1
tgcggatcttcacagcacttgctttctctcagaagctgtctggtctcccaccagaaactgtgttccaaccacttcttaaagataaccttgtggccaaagggctagttctgtcatttatgactgacttctttaaggagtatctgattgacaacagccttgatgatcttatttcaattctaaaacggggaaaagtagaggaggatcttttggacattttcccccctacaaaaagatccattgaagctttctctgagcatt

SEQ ID NO: 82983 - DNA, 257 bp, Glycine max
  Clone ID: 700957341H1
gtttttcatttcatcgtgcattcaatggccaccacagcagctctatccggaaccatggtgagcacctccttcatgaggaggcaacctatgaccaccacaagcctaaagacattccccaacgttggtgaagctctttttggtctgaaaagtggacgaggtggtcgtgtcacttgcatggcctcgtacaaggtgaagctcataaccccagaaggagaagtggagtttgaatgcccagatgatgttttcattgttgacaa

SEQ ID NO: 82984 - DNA, 255 bp, Glycine max
  Clone ID: 700957342H1
gaattatcaaaggtgaaacgaagaagccctaactacgcacgcattcgtgagataactcaatattcgtcgctcatggcactctcttctcgtctcttttccaaatccaaattgatctatggcagtcaaatacttctacaaaaggagcatgctattccagttcgtcactttgctaaagagtctgcccctcctgcccttaagggagacgagatgctgaagaacatttttgtggaggtgaagaacaaatttgagaccgcc

SEQ ID NO: 82985 - DNA, 252 bp, Glycine max
  Clone ID: 700957343H1
cgttcactcttcttccatcctttcctctctctctcaccctctgcatttcccaagcagagctgatattagaagatggcagacgctgaggatattcaaccccttgtttgcgacaatggaactggaatggtgaaggcaggatttgcaggagacgatgccccacgtgcagtgtttcctagcattgttggtcgtcctcgtcacactggtgtgatggttggtatgggccagaaagatgcatatgttggtgatgaggca

SEQ ID NO: 82986 - DNA, 248 bp, Glycine max
  Clone ID: 700957345H1
gtccctaatcctcaagattcactgtggatgatgaatttgaggactggggaatcaatggattctggatcttatctggagcgtccaggggagccggattgttcttattacatgagaacaggcctttgtagatttggtgcaacgtgtcgatttaatcatcctcctaacaggaagcttgctattgcctctgcaaggatgatatgcgagttcccagaaagaatagggcaaccagaatgccagtactatctgaa

SEQ ID NO: 82987 - DNA, 254 bp, Glycine max
  Clone ID: 700957346H1
ggcaatagtgcaattggctgcgttgcaggtttttgttatttttttgagtggtggtgctgattacataccgccttcaaggttggatgggttcgtctaccaaaatgggtacttagatttggatactgttttgatagaagcgttttatgatccggtgtgcccatacagcagggattcatggcctccactcaaacaagctctccatcactattcttctcgggtttcgttcctccttcatctcctccctttaccttacc

SEQ ID NO: 82988 - DNA, 254 bp, Glycine max
  Clone ID: 700957347H1
ttggaatccaaaaatgagagtaatcatcagcattcacataggtcaggccgggatccaggttggcaactcctgctgggaactctactgcctggaacatggcatccagcccgatggcatgatgccaagtgactcctccttcggtgtagcccacgacgccttcaacaccttcttcagctcgaccggatccggcaagcacgtccctcgcgccgtcttcgtcgatctcgagcccaccgtcatcgacgaattccgttgtg

SEQ ID NO: 82989 - DNA, 256 bp, Glycine max
  Clone ID: 700957349H1
cgggtttgtaagagaaagagaaaagaggcgcaagatgagtggtagggtttctgggaaggtgaagtggttcaacgatcagaaggggtttggattcataacccctgacgatggcagcgaggaactcttcgttcaccaatctcagatcaaatctgacggtttccgaagcctagctgaaggagagtccgttgagttcgctattgaatctgaatctgacggacgcgccaaggctgttgatgtcactggccccgacggcgcc

SEQ ID NO: 82990 - DNA, 255 bp, Glycine max
  Clone ID: 700957350H1
tggagggtgagctaaacccagatgggaccagagtaaatcaatggagacttgtcagcatccaacaagtagaagaggttaaatgcttagcaagaattatcccaatttgggcagcagggattcttagtctcatttccatgactcaacaaggaacatttactgtgtcacaagcaatgaaaatgttccgtggaacaacccaagcttgtttcacagctcagcaacaatggcttctatcccatgcatcacccaccaccatca

SEQ ID NO: 82991 - DNA, 254 bp, Glycine max
  Clone ID: 700957351H1
atcaatgtaagcagggcatggaagagatacaatttgagcttaggtcttggactgaacaaagttgctgggaaggttttcagaattggacatcttggcaacttgaatgagttgcaactgttgggatgtctagctggtgtggagatgatactgaaagatgtgggctatcctgtaaagcttggaagtggagttgctgctgccagtgcatacttacaggacactattcctatgatcccttccaggatttgagtcacaag

SEQ ID NO: 82992 - DNA, 104 bp, Glycine max
  Clone ID: 700957354H1
tacatttatttgttttacatatctccttgttgtgacctgcatagttcacatgaattttaaagttacaaatatatagatgtcattgtaatcttagtccacacaac

SEQ ID NO: 82993 - DNA, 255 bp, Glycine max
  Clone ID: 700957356H1
aaaatgcttgttcgcgaccctagaaggcggctgactgcacatcaagtattatgtcatccttggattcaagttgatggtgtagctcctgacaaaccacttgattctgctgtattaagtcgcttaaagcaattttctgctatgaacaagctcaagaaaatggcccttataattatcgcagagagcttatctgaagaagaaatagctggcttaaaagaaatgttcaagatgatagatgcagacaacagtggtcaaatc

SEQ ID NO: 82994 - DNA, 252 bp, Glycine max
  Clone ID: 700957357H1
gcgcaccgtatcgtgttttcattagacgctgcaatcgttcttctcttgagtttggtcgtctgggatcagatctgctctctccgtttggattcaattcgacactttcctcgccttaaagattatgcgaacaacatggttgtccttgctgcatccattgtgagcaaatctgggaaagtgctagtttctagacagtttgtggatatgactcgcataagaattgaaggtcttctagcagcatttcccaagttggta

SEQ ID NO: 82995 - DNA, 252 bp, Glycine max
  Clone ID: 700957359H1
ctcttcttcgtctcaaacttctttgtcccttcgattcattccatttcttccaaaatggccaaagacccagttcgcgttctcgtcactggagccgcagggcaaattggatatgctcttgtccctatgattgctaggggagtgatgctgggtcctgaccagcccgtgatcctccacatgcttgacattcctccagcagcagagctcatgaatggggttaaaatggaattggtggatgctgcattccctcttctt

SEQ ID NO: 82996 - DNA, 251 bp, Glycine max
  Clone ID: 700957361H1
ctcattctccatacctcaacgaagatgctaaagagacggcaacactttgctgtccgccttgaccgagcagagcttcgtcttggccctcgattttgccctaaagtactctcagtcacaacagacaccgtcgtcgtcgtcgtcgtcatcaatggcaccgaagcagaccaaggctgagaagaagatcgcttacgatgcgaactgtgcgacctaatggaggagtacggccagatcctcgttgtgaactccgataa

SEQ ID NO: 82997 - DNA, 252 bp, Glycine max
  Clone ID: 700957364H1
tgcgaatccctctctctatctctcacacacactttctctctctctctctctcacccagatcttgtagcaatggcgagcgctcccactccacgcgaagagttcgtgtacatggcgaactggcggacaggccgagcgctacgaggagatggtggagttcatggagaaggtctccgcctccgccgagagcgaggagctgaccgtggaggagcgtaacctcctctccgtcgcctacaagaacgtgatcggcgctcg

SEQ ID NO: 82998 - DNA, 255 bp, Glycine max
  Clone ID: 700957365H1
cactatagtaaaaaaaggacattcattcatctatggctacccttattgctcccagcaaccactctccccaagaagatgctgaagctctcagaaaggcttttgaaggatggggaactgatgagaacactgtcatagtaattttgggtcatagaactgtgtatcagaggcagcaaatcagaagagtttatgaggaaatttaccaggaggatcttgtgaagcgcctagagtctgagatcaaaggagactttgagaaag

SEQ ID NO: 82999 - DNA, 253 bp, Glycine max
  Clone ID: 700957366H1
ggtagaaaaaaaatagaggaacacactcttattgttttgaatttattgaaaaccacaaaaatgtgtgatgctcttgaatcctgattttgtaatttccaataaattctaaccagtagcaaagagtgagttagagagtatgttcctagcactcctcaaaaaattaaagtgcaaaatgacacaaaacatggtctcaagcagtcaagccaaataagaccatgataacacaccgagtactcaagctctgaatattaac

SEQ ID NO: 83000 - DNA, 255 bp, Glycine max
  Clone ID: 700957368H1
gtaatctgataccggcattaacgtttgtaattgcagcaattgcgggatttgagaaagttgacataagcttaagaagcacggccaagatattagggacagtttgttgcgtggctggagccttaaccatggcattggtcaaaggacagaagctgttacacacggagttccttccttctatacatctcaccggcagtcaaggtgatgattggctgctgggttgcctattgctcttagcaagcagtgttttttggtcat

SEQ ID NO: 83001 - DNA, 245 bp, Glycine max
  Clone ID: 700957371H1
ggttctagatgttaagggaagatattgtaaccatgaatgttgacgaagaggttcagcgtctcagccaagaaatcaagaggcttggtaaggtccaagcagatggttcttacaaggtaacatttggaacactatttaacgatgatgaatgcgcaaatatatttgaagcacttgttggaccactaagagcagcgaaaaagcgtaaagtactgacatacgagggtgagctactgctgcaaggagtccat

SEQ ID NO: 83002 - DNA, 254 bp, Glycine max
  Clone ID: 700957374H1
gttgttgttctaaagcactcatccacacattctccgtcgccacgacaacaatggctccaaagaaaggtgcgaaaggtggagttgtagcagcaaagaagaaggttcaggagaaggtaacgaaccctttgttcgagaagcgtccgaagcagttcgggatcggaggcgcgctgccgccgaagcgggacctgacgcgcttcgtgaagtggccgaagaacgtccaaatccaacgcaagaagcgcatcctcaagcagagg

SEQ ID NO: 83003 - DNA, 250 bp, Glycine max
  Clone ID: 700957375H1
gtgaatgtttcaacgacgaaaccggatttacaaggaggagcagcgcaaactaagggctgctaccaggaaaggccaggaggatggggttaatgaacatcatcattagaacctggagttaattttcaatctaagcttctgaacaattattttgataaaatgtttgtgatttgcttggatcggtattcctgcatgttctgtgagcccatattttatacttttgatgttgcgggcttcttttccctgtgcaata

SEQ ID NO: 83004 - DNA, 247 bp, Glycine max
  Clone ID: 700957376H1
ggtgcaaaaaatattaagatgataaacattggagcacttgttgtactctttgcatttctcttcctcagttgtgcctatgtcacaagacacaacaacccttgtgcctgcaatcataacttttggtgactcagccgtggatgtagggaataatgactatcttcccacccttttcaaggctgattaccctccttatgggagggactttgctaaccaccaacctactgggaggttttgcaatggcaaatta

SEQ ID NO: 83005 - DNA, 249 bp, Glycine max
  Clone ID: 700957378H1
ctctagtaacccttcttttctctctctctctctcgtgttctgcgctgctagaagcaatggagaggaaaagaagccatgcttctttcaccatgtttgcaatgcttgttggattgctctctcagagccttgtcattcctgtaatatccaccactgttgcagatcagaagaactactacaccccagatccacatgctggaagtccccccacaggctcacacaatagtagtctcccatctcatggccatggga

SEQ ID NO: 83006 - DNA, 255 bp, Glycine max
  Clone ID: 700957381H1
tacacaggctttcgtttgttgttgcttctctagttccttaaactctctgttccaaaatccttagaaaaggtaaaaaatttataaaaaaaaaaaattaaaaatggtggctgtggtttcccaagaaaatgttgtggcattggtttctcgtaccggtagggagttgcaacgttatagaaaaggtcgtcgccaagttgtgggatgcataccgtacagatttaagattggggagaagacttgcttggatgtttctgatga

SEQ ID NO: 83007 - DNA, 254 bp, Glycine max
  Clone ID: 700957382H1
atttagttctctggtagggcagagaattagaacatatattggaggcacccgttgagatgtattgctactcatagctttcagaactgtttcaattgcaggaagcaaaaaagctacactttttccagtgccagttttagctttgactaaagcatccatcccctcaaggcaaataggtaggctagcctcttgtatgcgggtcatttgaacatatgttctaattctctgccctaccagagaacttgctagtcaaattg

SEQ ID NO: 83008 - DNA, 254 bp, Glycine max
  Clone ID: 700957384H1
gcttgacattcctccagcagcagagtctttgaatggggttaaaatggaattggtggatgctgcattccctcttcttaaaggtgttgttgctacaaccgatgtggttgaggcatgcactggggtcaatattgcagtgatggttggtggattccctagaaaagaaggtatggagaggaaggatgtgatgactaagaacgtctccatttacaagtcccaggcttctgcccttgaaaagcatgctgctgccaactgca

SEQ ID NO: 83009 - DNA, 258 bp, Glycine max
  Clone ID: 700957385H1
caagaatatcaaattggtctcttgtcttcctcctcatctctacactactccacatcgccgcccagcctctcaagcccaagcccaagcccaagcccaagcccgttcataaaatcctcctgcagcagcacccagtacccagccctctgcgtctcatccctctccgtctacgcctccagcatccaacaggaccctcaccaactggttcagacagcactctccctctccctgaaccgcacccaagccaccaaaaccttcgtg

SEQ ID NO: 83010 - DNA, 121 bp, Glycine max
  Clone ID: 700957386H1
ctctttctccgagaacaacaaaaaaaacgtgattcgctcttcacttcgaataaaccacaaaaccaacaaacgagaagaggagtgagagaagatggggttgtcgttcacggcgctgttcagc

SEQ ID NO: 83011 - DNA, 251 bp, Glycine max
  Clone ID: 700957387H1
cttttgctcatttcctttgactcctcattatcaaagaaaatggctctcattgggttgctcttgatgggttttctcacaatgttctcctctgctcatgcctatggtggagggtggactaatgctcatgccaccttctatggagggagtgatgcatctgggacaatgggtggggcatgtgggtatgggaatctctacagccaagggtatggaacaaacactgctgctctaagcactgcactgttcaacaatgg

SEQ ID NO: 83012 - DNA, 252 bp, Glycine max
  Clone ID: 700957388H1
ggaatgcatctgcacaacatgctgctctcaactttggccagtacccttatggtggctatgtgcctaatcgtccaccactgatgagaaggttaataccagaagagggtgatccagaatatgcaagtttccatgctgaccctcagaagtattttctgaatgcattgcctagcttgctgcaagccacaaagttcatggctgtggttgacacactctccactcactcacctgatgaggagtacttgggggagaggc

SEQ ID NO: 83013 - DNA, 252 bp, Glycine max
  Clone ID: 700957389H1
cctgcatgctcctccaagccaccaccaaccgctacctatagtttctagtatatatacacaaaacaacacaccccacaaacatcacagacacagacacacaaaagtcaaaagggtcgcgatggagcaaggagtcgtagaaggaggtggcatgaataagatacctcgggattcaagagtgaaggagataagacaaggtgatgcacaaattcaggttcaggctcctcagcaaccccaaaagtgtcctcgatgcga

SEQ ID NO: 83014 - DNA, 249 bp, Glycine max
  Clone ID: 700957390H1
ctcttggtcctttctctaatccaaatatctctccgttaatgctcttcccacaaacttcaatagactagccaaaagctaacaccaactataggccaaatcaccaataaatattatttcccgttcttttggcgtgttggccacccactgaacacatttgcactcacacatagaccgcgagagaggccattggttggtttcagagatgggaagcatgcacatagaaaccccagaaacttttgctgatggtag

SEQ ID NO: 83015 - DNA, 245 bp, Glycine max
  Clone ID: 700957392H1
gctggtcatgcatacacaaattgggctgcaaagatggccgttggattagccacaggtgtcccctgggtgatgtgcaagcaagatgatgccccagatccagtgataaatacatgtaatggattttattgtgattatttctctccaaataaaccatacaagcctagcctttggactgagtcttggagtggctggtttacagaatttggtggtccaatttatcagcgaccagttcaagatctagcatt

SEQ ID NO: 83016 - DNA, 248 bp, Glycine max
  Clone ID: 700957393H1
agagagagagagagagagaaccgacaagcaaacgaaaagtaaatcaatcaatcgttggaatctctcaacttatcgcttcttcctgatttgggggtttccgtttcaatggacgacggcgagctggatttctcgaaccatgaagtgttttcgagtccgaacatgggggagcttccgagcagcggttcaatggacagtttcttcgacgagcttctcaaggacacgcacgcgtgcacccacacccacacgtg

SEQ ID NO: 83017 - DNA, 192 bp, Glycine max
  Clone ID: 700957402H1
tcgtacgttaggtccgaattcagactcaggttggtgagagagggatacaactctcaggagggcaaaagcaaaggattgcaatatctcgtgcaatcgtgaagaatccatcaatccttttgttggacgaagcgagagtgcactggatgctgagtctgagaagagtgtacaagaggctcttgatcgtgtcatggt

SEQ ID NO: 83018 - DNA, 254 bp, Glycine max
  Clone ID: 700957404H1
attgaattgtgcatacagaaacagttctgcagattatggtggtggtcccaatttccatgctactgaggataagccagtcatattcccccagtcctttgttcaacccaacactaaacacagtctgcaagtttggttgcaccttcatttgatctaactggtcttggagttccggaggatggacagaaaatgattagtgaccttatgacaatctatgatacgaatgttgtaggaaacaagacttaagttcctccaac

SEQ ID NO: 83019 - DNA, 259 bp, Glycine max
  Clone ID: 700957405H1
ctaaaacagaagaagcaaagatgatattgcagttcttcgtgctttcacagagaggcgataacatcgtctaccgcgactatcgtggtgaagctcaaaaaggaagcgctacgacattttccgaaaagtaaagttctggaaagaagatgctgagggagatgctccacctgtttttaatatagacggtgtgaactacttccacgtaaaggttgctgcattgctatttgttgctactactagagtcaatgtctccccttctctt

SEQ ID NO: 83020 - DNA, 259 bp, Glycine max
  Clone ID: 700957406H1
atcaaagtttcttcctttctctgctctttgccttctctgacacatttggtgccttgtagagcgtgttttggcaggaaggtggtatggcgaaggacgttgaggttgctgagcgtgctccttctctgggaaggactaccaggacctctccaccagcaccactcattgatgctgaggagctcacaaagtggtccttttacagggctctcattgctgaattcattgccactttgctcttcctctacattactgtgctcacagt

SEQ ID NO: 83021 - DNA, 258 bp, Glycine max
  Clone ID: 700957407H1
gctgggacaacgatgaggagaacgacaacgacaacaacgacgacgaggagttcgaggaacacgaggaggcggaggatcgctccggcaacgaggatccgcacggaagagacgacaggatctgagaagaaggaggcgcgagctgcttcggcttcggattagggatttggcgacgcgcacgaggagcatgcggaaccggatcttggattgggccgagattctgatgggccttgaggacaattccatcgagttccgcctcca

SEQ ID NO: 83022 - DNA, 120 bp, Glycine max
  Clone ID: 700957409H1
ctcacggcaattttataggtcctccaagaaagagagagagagagaggtaaacgtaaccaagggagagaaacaaccatcgtccaaaccaccaccaacatcgtacgtgctacgttgtacatg

SEQ ID NO: 83023 - DNA, 255 bp, Glycine max
  Clone ID: 700957410H1
cttgcacttttgcacaagactcttatgcccttaacctcgaattatatgtatttaattacatgacctgctagtacttttcatttaactatgttcttatccctccccctcctcctccatgttgaaagcttgctaagctttcagcttgtccggaaaggaaacccaaacttacaacccattcatttgtacactttttaagaaaatggtgcattttaaatgtaaaaatgttttgttatttgaaaatattttttttttaaa

SEQ ID NO: 83024 - DNA, 251 bp, Glycine max
  Clone ID: 700957411H1
gagcacactgcacagatctgagtggtgactctttcatttctcatcactattattattaggtctgaaggctcattgccattatcatgtcaaggaggccagtaaatccttcggtcggctaggtgatggtggaagtataccatttgttgcatgaatccagtccaaatctcaaaactctcccctactatctattgggcttgtcattgtgggtgcaatcctcctgattggttattgttacagcaattcaggtggag

SEQ ID NO: 83025 - DNA, 252 bp, Glycine max
  Clone ID: 700957413H1
gaaaactgggcagcctcgtggattcgggtttataacatatgcggatccctctgtggtcgataaagtgattgaggcacctctggtcatcaatggcaaacaagttgagattagcggacgataccgaggggagctgttggctctaaggattttaggacaaagaaaatttttgtaggtggaattccttcaaatgtgactgaagatgaatttagagacttctttacacgctacggcgaagttaaagatcaccaaata

SEQ ID NO: 83026 - DNA, 251 bp, Glycine max
  Clone ID: 700957414H1
gttatgaactctttagtccactacaagccgaaggaatatggaggtttctattacagatgaaattgcaggcactatggagctcaaccctgataggctgggtgagctcaaagctttgatgacacaaaagctggtgtgaaaggccttgttgatgaaggggtcgcaaagatcccaagattatttcatcatccacctgatgaatttgtcatggcttcaaagttaggcgacacagaatacactatacctgttataga

SEQ ID NO: 83027 - DNA, 256 bp, Glycine max
  Clone ID: 700957415H1
ttcaattcttcttctcatcacttctttttccacaaaaaagaaaacacgagaagggagaacgggactcttgtttcttgttgtattaggtgctgcttgggcatgtgattcaaggaactgactaactctggtacttccgaactaagcataaagccggatgtgtgtgcactttgtgaggaatatattaccaaggcacttgattatctacatgaaaacaagaccgagacagagatcattaatatcctgcacaacacttgcc

SEQ ID NO: 83028 - DNA, 255 bp, Glycine max
  unsure (1)..(255): unsure at all n locations
  Clone ID: 700957416H1
ctgttttgaaaaaaaagacgcacaccaacctttcctaattcacactgcacacttcatttctgaacaaaaaaaataaaaattattcctgttttagtgcttctttcttatccatgcgagtctgcttcggaacgctaacacatccctcctcaaacgttctctcttccactccgacaactcctcanacttttgctttaaaccgggagtgttgggcacgtctcaagttttaagcttttcaactcgtaaaaggaggtctaa

SEQ ID NO: 83029 - DNA, 173 bp, Glycine max
  Clone ID: 700957418H1
aggccttgagggctcaccagatttgaaggctgcaaaagaagttgctgactatctaggcactgtccaccatgagtttaccttcactgttcaggatggaatagatgccattgagatgttatctaccatgttgaaacatatgatgtgactacaattagagctagcacacccatgtt

SEQ ID NO: 83030 - DNA, 257 bp, Glycine max
  Clone ID: 700957420H1
cttgaaaaagaagtctctttggtccagaactttggaagagatagttgaaaagcttgtagatattgttacctatatacatcaagcaatttatgagttcgctggaaatcatggacagctgcaaccaagcacagtgagggttctgaaagactaggagaagctggtcttgcactgcactatgctaacatcatcaatcagataaatatggttgcatctcgcccaactgctcttcctccaaacaccagaggccgcctgtatca

SEQ ID NO: 83031 - DNA, 153 bp, Glycine max
  Clone ID: 700957421H1
ggatgaacgaatcaaaggatgcgttcgaagcagcgttcgaggaatcgccgccagaatccccaacggctacggagatagaggcagagacgcaaaaccctactcctcctcctcgtacacgcctcctccttcttctttttctggtgttgctgtagt

SEQ ID NO: 83032 - DNA, 256 bp, Glycine max
  Clone ID: 700957422H1
gtcagagtgacatctactacatcaccggtgaaagcaagaaggctgttgagaactccccattcttggagaagttgaagaagaaagggtatgaggttcttttcatggttgatgcattgatgaatatgctgttggccagctcaaggaatttgagggcaagaagcttgtctctgccaccaaggagggtctcaaacttgacgagagtgaagatgagaagaagaagcaagaggagttgaaggagaagtttgacaacctatgc

SEQ ID NO: 83033 - DNA, 256 bp, Glycine max
  Clone ID: 700957423H1
atcctgtatgggttggaaagcagctgtgaaactcattaggcactggaaaattctcagaggagataatgttatgataacaaggggcaaagataagggtgagaccgggattctaagcgtgtcattcgctctcaaaatcgtgtcattgtagagagtaaaaacctggtaaagaagcatataaagcaagggcaaggtcatgaagggggcatctttacagtggaagccccactgcatgcctccaatgtgcaagttcttgacc

SEQ ID NO: 83034 - DNA, 259 bp, Glycine max
  Clone ID: 700957424H1
ctctattctctattctcttctgcatcaccatttcaccactgagagaacaacacaacacatcaaacgagcctctcggtttccaatgtgaagagagccaacatggctacaatcgtgccaggattctcggttccaactcaaggccagcggtcgcgctccgccgcttgcggtggccggcgtactcctccgcctccgcggtggtggcggagcgagagaccacggaggtgaaggactacgccgattaccgccgctccctgtacgg

SEQ ID NO: 83035 - DNA, 252 bp, Glycine max
  Clone ID: 700957425H1
gaagaagattaaatgggttcctctatgcagacttgtctgattttgttatcacttgcttctgcttccttcgccgccaacccaagaacaccaattgatgtgccatttggcagaactatgtgcctacttgggcctttgatcacatcaaatacctcaatggtggttctgagattcagcttcatcttgataagtacactggtactggcttccaatccaaaggatcctacctgtttggtcacttcagcatgtacataa

SEQ ID NO: 83036 - DNA, 252 bp, Glycine max
  Clone ID: 700957426H1
tggtcagcatagaaagactccctctcagttccgacgaggcggcgactctgcattcccatccacctaacttctctctctttctctctctagggtttcgccatttatccctattaagctaatttcaatttcatttttaaggctgtgtttgaaagtgtgttcaatgggtactccggaattcccagatctgggaaagcactgtgctgtctcggattgcaagctcatcgatttcttgcccttcacctgcgattgctg

SEQ ID NO: 83037 - DNA, 249 bp, Glycine max
  Clone ID: 700957429H1
ctactgttactgttgcgtgggaagctttgtcaagggtcattatttcagtacccaaggtggtgctgccttcttatataatgcctgtccgtgatgccgtgtcaagatccgctatatggaatggaggaagaagaagggaggaccaattctcatacctggattttgtcttccaaaagcacttcagcctatattgccaatttttctccaaggtctcataagtgggtctgctgaattgatgctaaggctgctctg

SEQ ID NO: 83038 - DNA, 252 bp, Glycine max
  Clone ID: 700957431H1
catttctacattttcccctctttggagaaatcaaaagaggggaacccatgattcctcctccatcttcctttctcttccagttcctcctcctctttcctctcttactctccattccgattccgattccggtcaccccgtgctcccgcgcccgctgatcgtggagtacccggagttcgacgcggtgctgcggtgcggcgcgtggcgcgtggcgggggaggcgaacaacctaggcgcgtgggcgataattcccga

SEQ ID NO: 83039 - DNA, 252 bp, Glycine max
  Clone ID: 700957432H1
ctccgacgccactccggccaccgcagagtgaacaaggtcgtggaagatgagcaacgtgttcgagggttacgaacgccaatactgcgagctctcggcgaatctagcgaaaagtgcactgccgctggtgctcttaatggagagcaaaagaaacagaaagtttctgaagtaaaggctggaattgatgaagcagaagctttgattagaaaaatggaccttgaggcaagaagtttacagccaaacatcaggtgtgtt

SEQ ID NO: 83040 - DNA, 260 bp, Glycine max
  Clone ID: 700957433H1
ccctcctttcttttactagcacctagctaggactcaattctttggttacttaatagtagttcctttttaactatctttcttcaatggctgactcagcctcagcctcagcctctcttccagaatgtggtgctccatccccgaaaggtttcagctgcatgcggccatgttggccctgcagtttggctatgccggcttccatgttgtctcaagagctgcccttaacatgggcattagcaaacttgttttcccagtctaccgca

SEQ ID NO: 83041 - DNA, 238 bp, Glycine max
  Clone ID: 700957434H1
ctacaccgaaacaggtttcctataaaatcccgcacgtgccgttgcagatgagctgaaatcgagaagaagaagaagaagaagatggagaagtatcagatctggagcaggagatagcgttggcagcgtttgcgtttgctctgctgttccaatcggcctcagcagacgacgtcgttgtgctctctgaagataacttcgagaaggaagttggtcaggacagaggactccccgtgaagtccaa

SEQ ID NO: 83042 - DNA, 89 bp, Glycine max
  Clone ID: 700957437H1
gttctcccacaccacacccatgagactcttcctgctccttattctcctctttcacgcggcggaagtacagggacagtggcagctcctcc

SEQ ID NO: 83043 - DNA, 256 bp, Glycine max
  Clone ID: 700957440H1
gaaaggaacattttggtagggtaaaaaagtatctttgtaaagttggatgcactttctagtttggtttgagaaaaggggatatgctaccaacctggaagtattatagcattatttcaccacttcagtatgtgatctattttttcagtggtgcatttaataataaacatattgatgttatgatataagaagaaaaatggagcatgttttggagaaaagatttcctcttaattcagaagattacaagttatatgaagaa

SEQ ID NO: 83044 - DNA, 250 bp, Glycine max
  unsure (1)..(250): unsure at all n locations
  Clone ID: 700957442H1
cctttctcctaaaacatctccagtgggttcttcttcttctattacaactacgacatcaaagaccatgaccatggccatggccacgatcctgctcctgttcacggtctcgcggtttcatcggccctagacatgtcgataatctcgtagnacaacgcccacgccgccacgtcgcgcaggagtagcgagctgatgtccatgtacgagcagtggctagtaaagcacggcaaggtgtacaacgcgctcggagaga

SEQ ID NO: 83045 - DNA, 248 bp, Glycine max
  Clone ID: 700957445H1
gagtaatgataggcagatatatataaaatggccatttaataaagtattcaaagtgtgaatacctgaaagttaaatattaaatgaccatgtcttttgaaggaactacattgaaagttaggcactaattagttttggccttttggggtgcacctaagccaaaatcccctgccaaattcataaacttgttgtctcatgtgtgaacaattgggcatttttgtaacaagaacacagttaatagcccccagttt

SEQ ID NO: 83046 - DNA, 236 bp, Glycine max
  Clone ID: 700957446H1
tgtgaagcatccaatgcaccgtttaaaagagcttcgcttgcgcaaagttaatgatggtgaacgtctctgtcagattctgtacagaatgccaaatctagaaaagttatcttgtcgggcgctaaatatttgcttaaagagtcgtcggagtcacgtttgggaaccgtattacagctgaaggaattggatttgtggtggtcggagataaaggatataggatttgaacgagaaccagttcc

SEQ ID NO: 83047 - DNA, 150 bp, Glycine max
  Clone ID: 700957449H1
tgtttttgttctgcccttgctgaggcatatcaaggatcagccatctgttgttgctggagatggacctattgggctcattatggcccctacaagggaactagttcaacagatcacagtgctataaagaaatttgctaaggtactgggtctg

SEQ ID NO: 83048 - DNA, 254 bp, Glycine max
  Clone ID: 700957450H1
attgctcacaggatctgttcaccctacaagggatgaaaatggcaacttactcgtgactgagtttggattgtgcaaatacaaagatcatcaaactttgtccattcaagagttcccgagaattctgctcctggtcaactcccaagaacagtggatgtcattgcagaagacgatcttgttgattcttgcaagcctggagatcgagtggcaattgtggggatatataaggctcttgcagggaaaagcaaaggcagtgt

SEQ ID NO: 83049 - DNA, 158 bp, Glycine max
  Clone ID: 700957451H1
cgtacaatttgtgggtctcttaccaactagaacaaccaaccaagcatggctatactactatagaacaacaacttcacttctcaaactgtcagaataatatttcataccatcccaatccaattattcaccctcttcctatttcactccctcattctctc

SEQ ID NO: 83050 - DNA, 134 bp, Glycine max
  Clone ID: 700957453H1
aaaaatgctaacccaaagtgcttctctcctctgtctttttctctctcttgctatccttttggctagtggcactgctgcaagtggaactccaagaagcgcagtgccaagcaccatgtttcaacattcaacagaag

SEQ ID NO: 83051 - DNA, 253 bp, Glycine max
  Clone ID: 700957456H1
ggagcggcagagtctgaaataaagaaaaagtataggcgactttctattcaataccatccagataaaaacccagatccagaggcacacaagtacttcgttgagtacattgcaaagcttatcaagctcttacagatccaacagctcgtgaaaattatgaaaaatatggccatcctgatggcaggcagggattccaaatgggtatagctcttcctcaattcctgctaaatattgatggggcatctggtggaatact

SEQ ID NO: 83052 - DNA, 245 bp, Glycine max
  Clone ID: 700957458H1
gtagaaccttcactctgctatcccccatattcctgtgtttcctttgaaaaaaaaagaagaagaaaaaacatgtctaggttttttggattcttctttgtgggtctacgttgatgttggtcggtgtggcaaatgctatggctaactcttccaacaaatttgatcaactcttccaaccaagttgggcttttgaccactttattcatgaaagggatcttctcaaactcaaacttgacaaattttccggg

SEQ ID NO: 83053 - DNA, 244 bp, Glycine max
  Clone ID: 700957459H1
aatagaacaaccactcaccccctctccgatctaatggccaccgtaatcgacggcaaagccgttgcgcaaatcatccgatctgaaatcgccgacgaggtgcgcctctctctcaaaaatacggcaaggttccgggactagcagttgtgatagtagggaacagaaaggattcacaaagctacgtgggaatgaagagaaaggcatgcgccgaattgggaatcaaatccttcgatgtggaccttcccga

SEQ ID NO: 83054 - DNA, 169 bp, Glycine max
  Clone ID: 700957464H1
accaaacattttttttccatgaactttgcatctacactatcatcacatccatggccacagttgtgaagctccacgttttcccagaaagtttgaaccaacacaaaacgagttgctcaggagaggctttggctcatgcccttcacctggggtgcttggttttggccataaa

SEQ ID NO: 83055 - DNA, 249 bp, Glycine max
  Clone ID: 700957465H1
tcgggtcgatgacaaaatacttataaggaataagtgatggagagaaggaggcaggaattgcatgtgcttggtaaccaaaaccaaacaaagccttaagagttcatttttgggatgatgcgtttctcggagacagcatcaaaatccaaaactgttatttttttttcgtgatctcttacttttctgaacgccacacagatccaatggtcgagctgctactaatcacatgcatctcactacttttcctcattc

SEQ ID NO: 83056 - DNA, 251 bp, Glycine max
  Clone ID: 700957468H1
acacacgatacaacttggactacctgcgacagttaaagttgctgcaaaccttgtccggcttctcgcatataacaataagaatttcttacagaccgggttaattgttgtggttgggataaatatgaaggtggacaaatttatggagttcctctgggtggaacaatagtacagcaaccttttgctatcggaggatctgggtccagttacttgtatggtttctttgaccaagcctggaaagagggaatgaccaa

SEQ ID NO: 83057 - DNA, 251 bp, Glycine max
  Clone ID: 700957470H1
gaaaccctaatttgttacacctacaccttcttctctcattttctcatcatcaccaatcaacaacaacactgctcttttgcaaggagggcctgactttgacaaaatctccacttcctctccattcgcatccttgctttcatcaatgaaggctcttcctccctctcaagtgcattcatgaacgagccatggtcatggggcataagcattcccattagtttgtacgtgaaatttgcacttgagatccacactca

SEQ ID NO: 83058 - DNA, 251 bp, Glycine max
  Clone ID: 700957471H1
catgaatccaaaccgatctgtctgaaacaaacaaaaaaggaagatgcatatgtcgattccagtggcaaatgttgcgttcctctgaatgaatactgacccacaaaaacactaccttggtgccaccccttttcctaccttctccacctttcagggttcctgaataattaaagatgggactggctctgggttgtcttcaagtggagcaatcaacggtagctatcaaagaagtgtttggaaaatttgatgatgtg

SEQ ID NO: 83059 - DNA, 251 bp, Glycine max
  Clone ID: 700957472H1
cctgcacccaggggtgttcctcagattacagtgtgctttgacattgatgccaatggtatcttgaatgtctctgccgaagataaaaccactggccagaaaaataagatactatcaccaatgacaagggtagattgtcaaaggaagatattgagaagatggttcaagaggctgagaagtacaagtctgaggatgaagagcacaagaagaaggttgaggccaaaaacgctttggaaaactatgcatacaacatg

SEQ ID NO: 83060 - DNA, 244 bp, Glycine max
  Clone ID: 700957474H1
atctttcaatacaatattgctctctaagctttgattcttcttaattcatacgcttcccacactcattcattgttgtgcgtctggttttctgcctgaaatggagacatgaaccagagaccaaaatatgattgccttctttttgatttagatgatactttgtatccactaagcactggtcttgcaaaagcatgtggccaaaacattaaagactatatggccgaaaagcttggcatagagaaaagca

SEQ ID NO: 83061 - DNA, 245 bp, Glycine max
  Clone ID: 700957475H1
ctcttggctataaaataccagaatttaatgagttagtataccaaaattttgcggcatgaagcattagagaggcttcttgaaacaaataactttccagagtttatggtcgggtgtgcccagcaccttgtgaaggttcttgtgttcttggtattattgagaatcccgtatccattaaaagcattgaatgtgccatcatagacaaggcttttgaggagggttggatggtgccacgacctcctgtccag

SEQ ID NO: 83062 - DNA, 245 bp, Glycine max
  Clone ID: 700957476H1
cagctttgaacgccgaagaaggttcatccaatccccgaagtccttcaccgcattgccaccatgtcgaggagaaaggtcagagagccaaaggaagaaaacgtgctctgggcccagctgttagagatggtgaacatgtctttggcgtcgctcgcatctttgcctccttcaatgataccttcattcatgtcactgatttgtctgggagggaaacgcttgtccgcatcactggtggaatgaaggttaag

SEQ ID NO: 83063 - DNA, 235 bp, Glycine max
  Clone ID: 700957477H1
cggctcgagcaccccacttactattattattgtacaacacacccaggtctacaaatgcctgttagagagagaaagagtaataataataaagtggaagacaaaaattaggagagtgaaacaagaagaagaagaagaagaagaagacgaagaagaattgagaagatggtgtttgaggaaactgagctgaggctgggactgggactatgtctccctggaaatggaaccacggcaacaa

SEQ ID NO: 83064 - DNA, 172 bp, Glycine max
  Clone ID: 700957478H1
gcaatagctagctgttagaaatgaaccactactgtgaaagatgttgaatcatacgtacgtgtgttctatcagagaagctgcttttgatcttgtgttactacggagatgccaaatgagtggccgttgttcttgtttgagtttgctttagtaagaatccctttttcagttacaa

SEQ ID NO: 83065 - DNA, 187 bp, Glycine max
  Clone ID: 700957479H1
gaaattcaagaggaacggaacagaaaagtttagtacgaacagcatcgcaacatgtacaacgccaacttcgagaaccagacccgggccatgaacacctacaaggccaattcgaggcccattacgcgcagtcagaagacttcgaacaaacaataacctaaaaagctcgtcgcgcggttgctgctgctac

SEQ ID NO: 83066 - DNA, 249 bp, Glycine max
  Clone ID: 700957480H1
gagaatctgaaagacatgcctctgtctttgggggttatatagggtttttggctgagtagcaatttgttgttgttgcaaccaatttttgaagaaaagatgggggaacagcagcttccaatcctgctttgcaagtgtctgtttcatttggtagatttgagaatgattccttgtcttgggagaaatggtctgctttctcaccaaacaagtacttggaagaagttgagaagtgcgccactcctggatcagttg

SEQ ID NO: 83067 - DNA, 126 bp, Glycine max
  Clone ID: 700957481H1
ctcgtggcttcaagaagagaatctcaatggaggcccaggagctgaagcgcgtgttccagatgttcgaccgcaacggcgacgggagaataacgaagaaggagctgaagactcgctggagaacctggg

SEQ ID NO: 83068 - DNA, 250 bp, Glycine max
  Clone ID: 700957482H1
agagaggaaagtagtagaagaatacagggcagagctgcagccaacaccacccatggctgaatccgtttcagtggacatggagatgatctttctcggcggaaaggacatcatattcaaactggctgtggttctgtatctgtaatagtctgtggggatcaagaaaaaccagctctgatcacttatccagatatagcgctaaattatatgtcatgtttccaaggattatttttctgtccagaggcaacttctt

SEQ ID NO: 83069 - DNA, 243 bp, Glycine max
  unsure (1)..(243): unsure at all n locations
  Clone ID: 700957484H1
cgtttggttccttgtgatcgattagggttattattctttgtggttgcggaacgaagcatgctgttgctgttcgagaatggatgagttgaacggcgccatgacgaggagaatagcaatgcggaggtggttcgatgggagaggtttctgccgcggatggtgctcagagtgctgcttgtagaagctgatcattccacacaacatagacgcgaanatctgagcaccatccgcggcagaaactctcca

SEQ ID NO: 83070 - DNA, 124 bp, Glycine max
  Clone ID: 700957485H1
agcagaatagaaagcattaccaaacgttcggaaaaaatcggagagagggcatcgttcccaccggaaccttagcctacagcctccgtcgtccatggcgttatcgtctccgcctccgttgccacgc

SEQ ID NO: 83071 - DNA, 165 bp, Glycine max
  Clone ID: 700957486H1
ctttgtggtaacaaggttgatgtcaagaacaggcaagtgaaggcaaagcaggttaccttccacaggaagaagaatttgcagtattatgagatttcagcgaagagaactacaatttcgagaagcctttcctctatttgaacttcctgcaagtttcctggccaaata

SEQ ID NO: 83072 - DNA, 248 bp, Glycine max
  Clone ID: 700957488H1
tctctgtctggggagttcttagcaccaccaccagcttctgcagtagctttaagctacgaaagattttccttgaccatggggcaaaagcatttagtgacggtgttcgtttatgggctttaacatgttcccttcttccatctttctcctttggaattctgagaattggtttgaagaagagacctctagatcttgatagtattaatgctgctagaaaggcaagagaaggtctaagatctgtaagaccaatg

SEQ ID NO: 83073 - DNA, 215 bp, Glycine max
  Clone ID: 700957489H1
cttcaatgacgtccatggccactttcttcgcccaaacctccttcccctcccactctctctccaaaaccttcgatacccatttcgcccctgccccgaaagtcacgtctttgtgaacttcagggcgaggaggcacgttggggtgcgagtttcgaacgcgctgatcgaaccagatggagggaagctcgtggagcttgtggtgagcgattttgagaggg

SEQ ID NO: 83074 - DNA, 240 bp, Glycine max
  Clone ID: 700957490H1
cgaccaatccacttcggcgagtgcatataatagtaggtttatagaattcttttcaaaattaaagaattcttttaatcctaagtctgaagaactaaaatcaaagatataaagaagctcccgagcgtcgaatttttgaagaagaaacatgacggagttaaggacttctctcaagaagctatcctgaaactaccaattatacactggccgttcccgataccaaaaataccaaaaaacttctgg

SEQ ID NO: 83075 - DNA, 239 bp, Glycine max
  Clone ID: 700957491H1
cacaatcatcagttgttgcggactgagtggtgtgtcgcgttgttgacattagaatttgatcgatttggggttggggcggaagaaagtggaaacgacgccgtggaaggtgggaagaagatgagttcgcagcaaatgcaaatgcaaattcaaatccaaaacagtggtggtggcagtggcaacaacaacagcagcaacatcccagtgagcgaggttttctggactctcgtcgacaaagccga

SEQ ID NO: 83076 - DNA, 242 bp, Glycine max
  Clone ID: 700957492H1
ctcaattttccttctctttcagccatgaatccttctgagcaatttgtggaacatggaatgtctcagcagaatttaaagagaacatcttgtgcaactgtgccactctagcataccaaagtcttggaatagtttatggtgacctcagcacttctcctctttatgtttacaagaccacgttctcagggaaattgaggctcaaagaagatgaagaggaaatttttggcgtgctttcatttatcttc

SEQ ID NO: 83077 - DNA, 227 bp, Glycine max
  Clone ID: 700957493H1
ctggaattgctccattcagtgagcctgaaagtcaaattatgcggaaacttgccatatcttttgaaccgaatctatgggtcaacgtgcactctggaatggagctctttttatgccttatgatcataaaaatacaacaccagatggattgccattgcaacggatgaaatcattgcttgaagaagtaaaacatcttcattgccaagagcgctgcatgattgggtctggag

SEQ ID NO: 83078 - DNA, 241 bp, Glycine max
  Clone ID: 700957494H1
gtaaattaagagcatggctgcacaagctcttgtatcatcatcatctcttaccttctcagccgaggctacaagacaaagtcttggaccaagatcactccaatcccatttggcttctcaagaaaagcctcctttcttgttaaggcagctgctactccccctgtcaagcaaggatcagacagacctttgtggtttgcatcaaagcacagtctttcctacttggatggcagcttccgggtgacta

SEQ ID NO: 83079 - DNA, 247 bp, Glycine max
  Clone ID: 700957495H1
cgcaaaaatggcacctgcaacactgtctctgtctctcctcctcctgttctcactcagcatcgccgtaaccgttagatcgagcgactacgactacgattgtgtgacactgcatacgttagaaccggttcggtgttgaagggcggaacggactctaagatcgggctgaagctgtacgacaagtacggctactacatctacattaaaaacctcgaagcatggggcggcttgatgggcaagggctacgact

SEQ ID NO: 83080 - DNA, 240 bp, Glycine max
  Clone ID: 700957496H1
ctccagcctctgtctgtggttggtcttatcttttgctgaaacttgaaattgaatctctctcaagcttcctttcttaaaaggttaggaatttgaagcagaagtagaactaggaagagatgggagtggatttgagacaagtggtggcaggtgtcctcaccctcacaatgtttgtcatgcttggaaatatgatcaaaagagaccacttcgataattcacttcaagaaaagcttccaggaggat

SEQ ID NO: 83081 - DNA, 267 bp, Glycine max
  Clone ID: 700957501H1
tagagatactgttggtcgttgtatggatgtaagcaaaggtttcacattttctgaaataaattctgtacgtgcaagcactaacaaagttgtctgttgccatttctcatctgatgggaaattgcttgctagcggtggccatgacaaaaaggctgttttatggttcacagattctctaaaacagaaagccactcttgaagagcatgcatatttaatcactgatgtccgtttcagtccaagcatgcctcgtcttgcaacatcttcatatga

SEQ ID NO: 83082 - DNA, 175 bp, Glycine max
  Clone ID: 700957502H1
tgcagtcagcagtcataagcaacgcaacaattccatttccagtttctgattcgtcacgtcagacaaaggaaggggttagggtgtgacctgagatcaaaatgttgcggaggcttctctcttctcacctcaaaaccctagcctcctccgccgccgccgccgccaccgccactccccg

SEQ ID NO: 83083 - DNA, 161 bp, Glycine max
  Clone ID: 700957505H1
caacactgacatatctggtgttagaatgcattcttgaaaagctccctccagcttcactttgtcaaatggccggggtttgccgctccctaagagagagctgtgtgagtgatcacctttgggagagacacatgaaacagaaatggggtagaattattggtcaa

SEQ ID NO: 83084 - DNA, 250 bp, Glycine max
  Clone ID: 700957507H1
cgttaagctagtggcgatcggatccagctacagcatagagatcaaggaaggaaggaaggaagatgttgggtgttataaggcacaagagtattcgccctgccttctccgcaatcagacacttgtcttctgcagctaaagagattactgtcagggaggctctgaactccgcactcgatgaggaaatgtcagctgatcctaaagtgttcttgatgggtgaagaggttggggaatatcagggtgcatacaagat

SEQ ID NO: 83085 - DNA, 247 bp, Glycine max
  Clone ID: 700957508H1
tcgagccgctcgagccgattcggctcgagtcccgagctcatacccttgagccatgtcagtgccacgacgctcggtgccaagctcaccgaggttcggaagaacgggacatgcccttggctgagacctgatggcaagacccaagtcactgttgagtactacaatgacaagggtgccatggttccaatccgcgtccacactgtgctcatctccacacagcatgatgagcctgtcacaaatgatgagattg

SEQ ID NO: 83086 - DNA, 256 bp, Glycine max
  Clone ID: 700957509H1
gcgcgatcctcgtgactcgcgacccctcgggtttaaatcccctgcgacgcagcacaggctactacttcaccatcgccggataaaatggtcgacgacggagcaacctcggcggcgacgagccggagaaagccgtcgtggagagaaagagaaaacaacaggagaagagaacggaggagaagagcaatagctgcgaaaatatactctggacttcgagctcaggggaacttcaacttgccaaagcactgcgacaacaacg

SEQ ID NO: 83087 - DNA, 256 bp, Glycine max
  Clone ID: 700957510H1
ttcttgctcttggctgttctgcgtgtgtttggcccatatattacactgttagcactgcttatcagaaagcattcgactcaggattatcatacgatagcccagcatcagttctagggcttcttttcgtggtgaatagcattatcttcatgacactgggtttggccattggctacccagttgcttcagcttcagttaaggtgcttcaaggtctgtggaggaatgatttagcagcactaaagggttcttgtccaaattg

SEQ ID NO: 83088 - DNA, 259 bp, Glycine max
  Clone ID: 700957511H1
cgagcaacaatcggttactggtttcccaaatgtcgacgattccaatagttactggattgtaagacctgagccaggaacttctgctaaacaaggtgaccccattaaaagtggcacaatcattagattgcagcacatgagaacaaggaagtggctgcacagccatttgcatgcatccccgatatcaggcaatcttgaggtcagttgttttggaggagaatccgaatctgacaccggggactattggaagcttataatagaa

SEQ ID NO: 83089 - DNA, 257 bp, Glycine max
  Clone ID: 700957514H1
gatttatctatcttggttctctctctcaatctaacgatttcgccattcaacagcgatctttccgtctccatcatcgtcatcaacgctcccatttcctaaacctcagagagggatccagctaacagttgtttcccgctgaaaagttgcttccccacagaactgtaaagcaaacggttagatgcaccaacacaagcaccactaacgaaccattggttcagttcaatatataacgaatccgatactcttttcatctcaca

SEQ ID NO: 83090 - DNA, 141 bp, Glycine max
  Clone ID: 700957515H1
ctcgtgctacataaattaacggagactgtagacgggggtcggtatttgaattggaggtggatgtatgacgtgatcaatctatgcttggcggcggagtaaggtggttgcgctcctcggagcgattcaagtttctgacaacgt

SEQ ID NO: 83091 - DNA, 176 bp, Glycine max
  Clone ID: 700957523H1
aaactcaagtcatcaactgataactttacttccacaaaagtgcaaaaatgctaatgcaaacactgctgacttgcaaatggtggataggggaatcccgtattttcctctagcaaacagtcctttaaaatatggccagtagcaaactaccaaatacgtactacagatgaattccccaa

SEQ ID NO: 83092 - DNA, 166 bp, Glycine max
  Clone ID: 700957524H1
ttggaagtggaatcgcaccgatccggattttcacaaatcaaggatggcaagaacatcaatgtctcctactactgcttataatccacctgaagattctttaagtcaagatgtgattgcgactgtagagaagagtatgaaaaaatatgctgacaacctaatgcggttt

SEQ ID NO: 83093 - DNA, 264 bp, Glycine max
  Clone ID: 700957525H1
attcggctcgagctggaatttgctgtggtgttgtcggagaaggtgacactccggctccactcgagccaactactcgcccctccaggcgccggagtttggacatcttacccttaaaatacatcgctgacatggcggtgccgccgtcggatggttcacggaaacgtcccaagctggatctcagggaccgcgataacgtagttcaaaattgcgacgaatccactggacacaaggtggtgacaaaagaagccaaagtggaaatccacg

SEQ ID NO: 83094 - DNA, 253 bp, Glycine max; identical to SEQ ID NO: 82424
  Clone ID: 700957526H1

SEQ ID NO: 83095 - DNA, 253 bp, Glycine max
  Clone ID: 700957527H1
ggaacatgcttagaaaactgccaagcccacccatattctctcataactttcaaccatgaactgaacaacaacaacaacaacaacaggtcctaccgtacagacccacctccaaagagatcatttttattaccaattttccgatttcacagagaaaattctttgtgggcatctcttcaaaaatgtcaagcttccccaagccggtggcggaaggccgcacgtccggcaaggcaccggtcaaatccaccttttctca

SEQ ID NO: 83096 - DNA, 253 bp, Glycine max
  Clone ID: 700957528H1
ataaagggtatggaatagggttgggagggatcaaaacccacaacactacacggcactgagttattagtaattgtgttgtgttgtgttgagcagagagtaggatcaagaaaggataagaagatagagggaatagggttagggttagggttagggttaggttgaggatgccgaagaacaagggaaagggaggtaagaacaggaagaggggaaagaacgaggcggacgacgagaagcgagagctggtgttcaagga

SEQ ID NO: 83097 - DNA, 195 bp, Glycine max
  Clone ID: 700957529H1
attcggctcgagtagggttatcatttctccatttccattttctctctcactgttcaagaatcgtaagctatgggaaagtcttacccaactgtgagtgctgattaccagaaggccgttgagaaggcgaagaagaagctcagaggcttcatcgctgagaagagatgcgctcctctaatgctccgtttggcatggcac

SEQ ID NO: 83098 - DNA, 255 bp, Glycine max
  Clone ID: 700957531H1
gtcaaaaccaccactaccgttgatgaagctctggaggctcttgtaaactacagaatcagtggtcttccggtaatcgatgaggtctggaatctggttggagttgtatctgattatgacttgttagctattgattcgatatcaggaggtcctcaaagtgatgcaaacttgttccccaatgttgatagtacttggaaaacattcaatgagttacaaaaactgcttagtaagactaatggccaagttgtcggtgacttg

SEQ ID NO: 83099 - DNA, 238 bp, Glycine max
  Clone ID: 700957533H1
atccaaccccaagcatcatagaatctgaccaagagctccaagcatggtggagagaaatcaaaacagtgggtcatggagacaaatctgaagaaccatggtggccaaatcttaacacatcaaaagatcttattgacatcataaccacaatagcttgggtagcatctggtcatcatgcagctgtgaacttttctcaatatgcttatggaggctatttccctaaccgacccacaattgcaag

SEQ ID NO: 83100 - DNA, 98 bp, Glycine max
  Clone ID: 700957534H1
aaccaagttccacaggaagtgacaggatagatggagctgatggtgataaaccaagttccacaggaagtggcaagatgaggaggaggacatgctatgag

SEQ ID NO: 83101 - DNA, 72 bp, Glycine max
  Clone ID: 700957538H1
ctgaagtatactactagggaagcatcagattttcatgctcctcctttcattaaattgaagtgcagaacagtt

SEQ ID NO: 83102 - DNA, 243 bp, Glycine max
  Clone ID: 700957541H1
cttctattctattctaaactcgaaacaatcttagagaaagaagcagaagaaaatgccgatttctagaattgccattggaaattcttcggagttgaaccaatctgatgcacttaaggctgcactagctgagttcatctcaatgctcatctttgtttttgccggggaaggctctggaatggcttataataagctgacaaacaatggctcagcaacaccagcagggttagtggcagcatcactgtc

SEQ ID NO: 83103 - DNA, 187 bp, Glycine max
  Clone ID: 700957542H1
atggaaccttactattatttaagaatgaaactacgctgatgcttccactagagaaaaaaagtcatgtaggtggggttgagtgaataatagttaataatttaaaattcacatcataatggaaccttagcatcgaaggacaaattatagaatgttgtgtgtgtataaattccaccaaagccaccccacc

SEQ ID NO: 83104 - DNA, 157 bp, Glycine max
  Clone ID: 700957543H1
catcacattacattagattggtggtaatggcagcgtcactacaagcagcagctactttcatgcaacccaccaagttgagcaggagcaacactttgcagcaaaagtctactcagtccatttccaaggcttttggtttggaacctgttggagctaaaaa

SEQ ID NO: 83105 - DNA, 242 bp, Glycine max
  Clone ID: 700957544H1
cagaaactctgtacagttaatcaagcccaacctcacctcgactcacctcacaggttttagttgttaattaaatatatagatagaaatccaaggaagaagatgaagcagtttgccgtccaaaacgtcgtcgctccatcccacgatgagattagcgtggtttgccccaagccccgccgcctcggcctcttcaacttccccgtgaacgatccccctgttagacccttctactggcatctcagttg

SEQ ID NO: 83106 - DNA, 145 bp, Glycine max
  Clone ID: 700957545H1
atggctcctaagggtttaacctttctggctgtgttaatatgcgtttcagcactgtcactgagtgcttctgttgcgggggaagggcaaaataatggccttgttatgaacttctacaagggatcatgccctcaggctgtagacatca

SEQ ID NO: 83107 - DNA, 117 bp, Glycine max
  Clone ID: 700957547H1
tctctccatcactcactcactattatagtactcttcctccaaacaattaaggttataataatcttcttccaaaaccccccccaaaaaaagagaagaaaaaatcatgcaaagcaggga

SEQ ID NO: 83108 - DNA, 172 bp, Glycine max
  Clone ID: 700957548H1
attcggctcgagattagcgactatggtcttccagtgttacattgaaggtccagatgagtacttatcacgctcaagttctacaaatagggttgctcctaaattagatgtatcacaatatacatcttgcagtaatgatgttgtgaagattctgctgcagtgtacatcaccgttg

SEQ ID NO: 83109 - DNA, 125 bp, Glycine max
  Clone ID: 700957549H1
attccccttagctttctctcttctctctccccgcccaaaccctaactccctaccctattccgctttctctcatccatcatgaaaggaggaaagtccaagaccgaatctaagagagccgatgccaa

SEQ ID NO: 83110 - DNA, 245 bp, Glycine max
  Clone ID: 700957550H1
attttatctattctctctctttcttttgtgttctaagcagctagaagcaatggagaggaaaagaagccatgcctctttcaccatgtttgcaatgcttgttggagtgatctctcagagccttgtcagacctgtagtatccaccactgttgaagatcagaagaactactacaccccagatccacatgctggaagtcccccctcagggtcacacagtagtactcctccatctcatggccatggaagct

SEQ ID NO: 83111 - DNA, 144 bp, Glycine max
  Clone ID: 700957552H1
gtgggaacattatggagcccagattcgtaatctccgcatcggaggccgaatcccaatctatctccaaactcctcccttccctcgtttcctcttctcagtccctcgcccgtccttccatctccaactttcccgtcgccgccgtcg

SEQ ID NO: 83112 - DNA, 143 bp, Glycine max
  Clone ID: 700957554H1
catggccacctctgctattcagcaatcagcattcgcaggtcaaactgctctgaagcagctcaatgagttggtccgcaagaccggtggcgccggcaaaggtcgcaccaacatgcgccgtaccgtcaagagtgctcctcagagca

SEQ ID NO: 83113 - DNA, 148 bp, Glycine max
  Clone ID: 700957556H1
gagaatcacttggaaacaaccgcgctaaggttggaacttggaggaacttgtgtctgtgtgtccttttttccagagtcatggctatggctttgagtctctcccaattccctgttcgtgggtctgtttctttgcccaaaagaagactacc

SEQ ID NO: 83114 - DNA, 237 bp, Glycine max
  Clone ID: 700957557H1
cgcagagaagaacagagagagatccatccatcaattccaatggccgatcagctcaccgacgaacagatctccgagttcaaggaagccttcagcctcttcgacaaggacggggatggttgtattaccaccaaggaacttgggaccgtgatgcggtcacttggccagaacccaactgaggcagagctgcaggacatgataaatgaggttgatgctgatgggaatggtaccattgatttc

SEQ ID NO: 83115 - DNA, 97 bp, Glycine max
  Clone ID: 700957558H1
tgtttgtgtgtttcattgtcccatttatatgtccaatcccaaatattattgaaggtttgttgtttaacggtttgatcatcaatgcaagaagaggatt

SEQ ID NO: 83116 - DNA, 237 bp, Glycine max
  Clone ID: 700957559H1
cgacgagacatactcgctggggaagtcactaaccggcaagaacctcgtccagctggcttccaaaggcggacagaggaactccatcaacgttgttctgacatccgctgatgtggcggtcgaaggtttctgtatgagccgatgtgggacccacggctcttccgcttctcatctgaagaagaacagcaagagctacaagttcgcctacatctgggtgggaaactccgaaacccaatgccc

SEQ ID NO: 83117 - DNA, 237 bp, Glycine max
  Clone ID: 700957561H1
ggaggaggcggtggaggagatgatgaggattcacagatcccttcgagcccggccagggatagacgaagtcgaagtggctagaggtttgatcgggaatgttgagaaagaagaccaggcgatgctccaagccatagcgcggcagagcaagggcgttcatgtgccccaagagctcttcatggtgctccacgagatgcagaggaacttcctttggtcaccagagcaaggagcagataagag

SEQ ID NO: 83118 - DNA, 148 bp, Glycine max
  Clone ID: 700957563H1
cgcaactcaatttttctctcaaccggcccaatttagcataagcccagcatggccaccgcaacagcagcagccacctcgtccttcatggggacgcgcctcctggaggcccactccggggcggggcgggtgcaggcccggttcgggtttg

SEQ ID NO: 83119 - DNA, 235 bp, Glycine max
  Clone ID: 700957565H1
ccaaccccaagcatcatagaatctgaccaagagctccaagtctggtggaaacaaatcaaaacagtgggtcatggagacaaatctgaagaaccatggtggccaaatcttaacacatcaaaagatcttattgacatcataaccacaatagcttgggtagcatctggtcatcatgcagctgtgaacttttctcaatatgcttatggaggctatttccctaaccgacccacaattgcaa

SEQ ID NO: 83120 - DNA, 155 bp, Glycine max
  Clone ID: 700957567H1
cattggtgagactctcgaacagcgtgaagctggtccaacaacggctgttgtttctgagcaaacaaaagcaattgcagctaaaatatcaaattgggacaatgttgttttggcctacgcgccagtttgggccattggaacaggcaaggttgctactc

SEQ ID NO: 83121 - DNA, 102 bp, Glycine max
  Clone ID: 700957568H1
gctcttcttggatttcttctgggacttttcttaatggtcactcatgtctaggggtatggttttggaggttggaccaatgcacatgccaccttctatggaggt

SEQ ID NO: 83122 - DNA, 254 bp, Glycine max
  Clone ID: 700957570H1
caagcctcttaccggatcacctcgcacagaaacatcaatcattaatggaacttataggggatttatggaagttatactgcagaacaatgatactaagatgcatacttatcacatgagtggatatgcattttttgtagtcgggatggattttggtgattggtctgagaatagcaggggtacatataacaagtgggatggaatagctcgcactacagtacaggtctatcccggagcatggacagcaatttggtttc

SEQ ID NO: 83123 - DNA, 256 bp, Glycine max
  Clone ID: 700957571H1
attgaacttagccatcattccctgacatgaagcaaaatctggtttggtcatccatagatacctctgaaaaccaaattagactcttgcaccgcaataatggcaataaaatactagcataatttatttgtgagtctcaaaaccttagcacactatatatacactgcatagccttggggtcttcaaaatcatcaattcaatggcttccctcatgagcaccatcctcatgcaaaggtcttcttctacttcacttgctgct

SEQ ID NO: 83124 - DNA, 103 bp, Glycine max
  Clone ID: 700957572H1
gagggtcattactgttagactggcaacggtagatagtatttctgcgtatcttgagagtgttcaggatgaagtggccgctgtactcattgctaaaagaaccctg

SEQ ID NO: 83125 - DNA, 134 bp, Glycine max
  Clone ID: 700957573H1
ttcatctacttcaagaagatgaaataaactttcttaataatgcacaatcatatctttttgtgggacttatcttattcgcaagagggcaagtgtcataaattaaatgcaactatggtttgtacactctaaaagga

SEQ ID NO: 83126 - DNA, 229 bp, Glycine max
  Clone ID: 700957577H1
aatttgattagtcaagaacaacaacttgaaggaacatttaggttcatgcatgaaagactttgtactcatgctgaatctgttgctttctttgggggtggtgctcgagaaaaagctatggtcgagtctagattcagggagcttctcacccactccgagtaccttttaaaaaagaagtggctgtatggcatcctggatgattttatcacaaagcaacttccacataatgtga

SEQ ID NO: 83127 - DNA, 228 bp, Glycine max
  Clone ID: 700957578H1
aaagctttgtattttctgcgataattttccattgggtggaagaaagtctcaacctttattcgaaagagcaaggatctgagttgagttgagtgatcatgtgtggtggtgcgattatctccgacttcataccggcaggtcccgccagcggggcgcggcgcgtgaccgccgacatcctgtggccgagtttgaggaagcgcttctcgaagccgctgctggacgatgatttcg

SEQ ID NO: 83128 - DNA, 170 bp, Glycine max
  Clone ID: 700957579H1
ggtctttaatgatttcatctctgttctctattaccagaatatgaatgtctctaatttggggtatttttatatttaagcttgatatatataacttgtatctaaaatttagccatagcagttatctgctatcccactatagtgttttttgggttggcctctcgtcactgtta

SEQ ID NO: 83129 - DNA, 97 bp, Glycine max
  Clone ID: 700957582H1
gcaatagcagcagaacagagagagcaaaaccctagagcatccatcacaagcagaggaagaagatggtgaagttcctgaagcctaacaaggcagtgat

SEQ ID NO: 83130 - DNA, 262 bp, Glycine max
  Clone ID: 700957585H1
cgagtgcaattgaagttgaagtcttgcccttctctcttcaactccaaacacaagacatcatcatccatggctgcctccgtctccactgtcggagctgtcaacagagctcttttgaacctgaatgggtctggacctggggtttcagctcccagttcatccttctttgggagcagcttgaagaaggttattggctcaagggtccccaacacaaagatttcctctggaagcttcaagattgttgctgtagaagagaagaaagaga

SEQ ID NO: 83131 - DNA, 258 bp, Glycine max
  Clone ID: 700957586H1
gttggatttatatctgctttgctgtttaagtatgcaggattggatattgacaaccttcagaacttggaaagttgtctctttgtccttttcccatatttctcgtatatgcttgccgaaggccttggtctgtctggtattgtgtcaatcctgttcacaggaatagtcatgaaacattatacgtattccaatttatcgcaaagttctcaacggtttgcctctgcttttttcgagttgatatcatctttagctgaaacattt

SEQ ID NO: 83132 - DNA, 257 bp, Glycine max
  Clone ID: 700957587H1
gcagaaagaccactgagtctaggggatgtaacagccaagaacttaaaggaggttggattcaacacatgggagaagttaattctcagggatccatctgagtactctggtaagttatcatttgaatacaaatcagctgagagagagaagctggagaaggagggatacagaatcattggaaacgttggagaccaatggagtgacctcctgggaagcaacaaagggactaggacttttaagctgcctaatcccttgtacta

SEQ ID NO: 83133 - DNA, 109 bp, Glycine max
  Clone ID: 700957588H1
gtgagaaactaggctagttagtcccattggaatttttttttttgtggctgaagaaggtgaaaagggggcaagtttcactcttcaaggagtttgaagggtgtcaacttgt

SEQ ID NO: 83134 - DNA, 226 bp, Glycine max
  Clone ID: 700957589H1
attcagcctcctccaggcataaaatacaagtgcccacaagcagtagttgcagcgcgggcagctatcgcacgcactgcatttgcaaagaacctccgtcctcagtccctgcctacgaaggtcctcgtgattgggatgctgggcatggcggctaatgttcccttgggtatatggcgagaacatactaagaaattttcgccaacatggtttgctgcagtccatgcagctg

SEQ ID NO: 83135 - DNA, 229 bp, Glycine max
  Clone ID: 700957590H1
gaaatccgagtctctcatctctcttgttggtcttactctgcatcatctctctcatccttgccttggctcaggcagattcagattctcatttcgaaggctttgaagccgaagacgacgatgacgacttggaagactcttccatccatccagcctctctccgatcagcccccctctccgaccctactcccactccccagcctccaccttcggatctccccaaattccctcc

SEQ ID NO: 83136 - DNA, 61 bp, Glycine max
  Clone ID: 700957592H1
ctttctcgtcactagctctgtgcattcttctctcgctctctgccttccatcacactcggca

SEQ ID NO: 83137 - DNA, 225 bp, Glycine max
  Clone ID: 700957593H1
gaatcttgtttggagtgacaccctactccatgaagtgattaagtgaatattggtgacaagattgacaagattgttgtgaggagggggggagagcatatgcttgcaagttacatacagtatgtatatcacttggtatattgctaaatcttaatgtcttctacctttcactcctgactaatttttagtgtatgtgtagggatactgttaaaatttgtttatatgcga

SEQ ID NO: 83138 - DNA, 229 bp, Glycine max
  Clone ID: 700957594H1
gtagtgaagaaaatgaaagtccttgttttctttgttgctatagttctagcagcatggcattgccatggctcagaccatgaccatgaccatggccacacctaccaaattttccctctgagaatgaaaactggccatggtggccactacattccggaggtatcatgccaaagttggaggcttggtgtggaagcacacaacgtcattgactggaaaaccgttcctcaagatt

SEQ ID NO: 83139 - DNA, 132 bp, Glycine max
  Clone ID: 700957595H1
atttctctctctctctctctctctaacacggagtgatggctgtgcagctgtgggaaaccctgaaggaagccatcgtagcctacactggcttctctccttccaccttcttcacggtgctggcgcttctttttg

SEQ ID NO: 83140 - DNA, 267 bp, Glycine max
  Clone ID: 700957601H1
ttaaaatataagagatagaattaactcgactgcaagtgcaacaagaacacaggatagaaaatttgaatggagagtggtgaagactattccctgtttgagactaggaaagacaaaggaaggcacattcgaaggatctatgcaatctctttgtttgtggccatatgcttcatctgggcttacagattgagccacatacccgcatatggcaaatgggcttggcttggtttgtttgctgcagaactctggtccggtttctattggctcttt

SEQ ID NO: 83141 - DNA, 259 bp, Glycine max
  Clone ID: 700957603H1
gagttctcagtgcatggtagtgatgaagagattgacgatcaaccagaggtgggcagtgatgaggatttcagtgatgatggcgacaaacatgcccttgaagaggtagacttgtgttttcatgttttataactgatttacctatctgaatatgtaatgaaattccccctaaagaagaatttcaagtcttttgggttgcgtttggtgttgcccatgctagcaacggcaatgaatctgcaatgagtgtgtttggactggtgtt

SEQ ID NO: 83142 - DNA, 268 bp, Glycine max
  Clone ID: 700957604H1
tcgaggaagcatggaccaaactgctactaccgaaacagggcagagtgatcttttgtctattatacgtccaatgcttgtttatacaggcttgattgaacagttacaacgtttcttcaaggtcaagaaatcaactagtgcaacaccacctgcaaggactgaaggggcttcatctactatagaaggggaagatgaaagtggaaatctggaaggctgggaagtggtaatgaaagagcgactcttgaatgtaaaagaactgctcgagttcccc

SEQ ID NO: 83143 - DNA, 266 bp, Glycine max
  Clone ID: 700957605H1
ctcgagcctgcttgggcgagtgaagaggtgaaagcttgagagcatataaagcttgaggcctgatttctgcgtttctcggagaatttgtcttcaaaaaagaagggcaaccagtggatttatgtcgtctgggtttattctggcagtgattggggctccgttgaagctcttcattgtatatgctttcgtttctttcttcttgactctctttgtttgctactgttgctgtatgctacactgcattctgagccacaatactgtgaacctac

SEQ ID NO: 83144 - DNA, 179 bp, Glycine max
  Clone ID: 700957606H1
gctcgagcttctcaatgctacagcaaaggcatttattgcacactttcagcttgaaactcgctgatcatacttgcaagcaagcccccatccaatagcaatgccacctcaaatcaaccttttagcatctccaagtccttcactatttattttatttatgttctctttgctttgattgcctt

SEQ ID NO: 83145 - DNA, 259 bp, Glycine max
  Clone ID: 700957607H1
ttgattcagaatggcaggatagaacaaccagcgatccaattcgcgaatgcttcctcttcttcttcctcctcgctttctctctcctccttttcctcttctctctctctcctctccgcaccccttcttctccttcccccacccatttccacgttcccattgccgaaacctcgttcgtggcctccctcgaccacttcctcgcccacgctcaaacgtccctcaaagaccacacagcgcgcgacgtcacgaagctcgacgacgc

SEQ ID NO: 83146 - DNA, 143 bp, Glycine max
  Clone ID: 700957608H1
cggctcgagtttcccttttcagctttcattggtgtggcctagctgttttctcaatgagaaagccttcatctctgcgaagcgcacttttgcgtttggggttcccttgttgcttgttatcaccttctgttatgctacttctactg

SEQ ID NO: 83147 - DNA, 230 bp, Glycine max
  Clone ID: 700957610H1
gggggttactgtctgttcaagctaccatctctctctctctttcttagtgcctccttgccagaagttaaaatggcccaagaaactttcctattcacatctgaatcagtgaacgaggggcaccctgacaagctctgtgaccagatctccgatgctgtgctcgatgcatgcttggagcaggaccctgacagcaaggttgcctgtgaaacctgcaccaagaccaacatggtgat

SEQ ID NO: 83148 - DNA, 256 bp, Glycine max
  Clone ID: 700957611H1
tcgaggaagaattaaaaggaattgaagaagatccaagataggttcatatggagaggtataccatgctgactggaatggcacggaggttgctgtgaagaaatttttggatcaggatttttcaggcgctgcattatcagaattcaaaagagaagtgcggataatgcgtaggctacgtcatccgaatattgttctttttatgggtgctgttactcgtcctcccaatctgtcaatcatttcagagtatctaccaagagga

SEQ ID NO: 83149 - DNA, 102 bp, Glycine max
  Clone ID: 700957612H1
tcgagacgttttcaaatttgaagtcaaacacgttcaactgtcgtctttgtaattcattcccatatcgtcaaaggtggggaaatttgcttccacacaacatac

SEQ ID NO: 83150 - DNA, 265 bp, Glycine max
  Clone ID: 700957615H1
aattcggctcgaagttgattaaggcaaagggtgtgatgagattaattttgagaagaaaccagcaatcggcgattaggagtgagagtgatatggagggaattgcaggaaatagcagcagatacagtctgaaaccctcgcgaatttgcaacgaagatattctgatctgcgtcgacgtcgatcctcagtgcctcgtcgaaatgcaaggtgccaccggtcccaatggcagacccctcacccgtgtggactccatcaaacaagccatcgt

SEQ ID NO: 83151 - DNA, 261 bp, Glycine max
  Clone ID: 700957616H1
cggtccgaattcggctcgtgatcctatcatcatggtggccaactgggaatgcagaatagaggcctcaaattggtctacctaaagatcaaagccctccaccttacacgagaccagatgacctcaagacggcatggaaggttggtgttctcactgcggtcatcaagcatatgtcccctgatattgccaaaattcgcaagcttgtgaggcagtctacgtgtcttcaagacaaaatgactgcaaaggctagtgctacctggcttg

SEQ ID NO: 83152 - DNA, 183 bp, Glycine max
  Clone ID: 700957617H1
gcaagaatggcacttcgttgcttggtgatgtccctttctgttctcttcactcttggtcttgcgagagaaagccatgccagagacgaagatttttggcatgctgtttggccaaacactcccattccaagttcattgcgagatcttctaaagcctggccctgcaagtgttgcaatcgatgatcac

SEQ ID NO: 83153 - DNA, 201 bp, Glycine max
  Clone ID: 700957620H1
gaatttatgggttttgactctgcgagaaatattgcttggatctcgtcattattctacgccagttgatgtttggtcagtgggatgtatatttgcagagatggtaaaccgacgacctctattccctggggactctgagattgatgaattatttaaaatattcagaatcttgggtaccccaaatgaagacacatggcctggtgt

SEQ ID NO: 83154 - DNA, 207 bp, Glycine max
  Clone ID: 700957621H1
gctcgagcttaagcagcttcagagtctgagaagtgagaagcggaagaagaagcgatgcgtttttgcccgtgttttggatccgaggaggccaagggggtggcggatcgcgacccggtcctgctggtttcgggcatgggcggctccattgtcaattccaagcccaagaaattcgggttcaccactcgggtttgggtcagactcctcctc

SEQ ID NO: 83155 - DNA, 254 bp, Glycine max
  Clone ID: 700957622H1
gtttgtgagaaaatggaagctgcgatgggactgatgcggaggattcctccgaaacacacagaaacagctctgtcagcgcttctgagccttatgcctgacaactcctccgatctcctctctcaagtcgatcagcccctccaggttctgtgcgatgtggaatgcggcaaggagttcattttgtgcgaatacaatcgagatgccgactcttacagatcaccttggtccaataaataccatccaccattagaagatgg

SEQ ID NO: 83156 - DNA, 251 bp, Glycine max
  Clone ID: 700957623H1
tcattttccattcgtagacgccaagaaccctaacaggagaatgcagtggacctggataatttgtgaggatatttaacatcgtgtacattgtgctcctttaattattttcatcagttggtgttgtgatggatggtgataatggtcttaacatacgtaattggggttactatgaacccgctacgtcgtttaagagccacctggggctgcagctgatgtcatccttgccggaaaaacctttaattggagggcgc

SEQ ID NO: 83157 - DNA, 196 bp, Glycine max
  Clone ID: 700957625H1
atacagcataatacttaataccatcggcaacagcggaaaaaggcagaaaccgaaatgcaatgttcttccatcttttatcctcagacacataaaatatggtgctttaagccaagtctttcagtaacgccaccgccacaacaacaacaacaacaacgaacctctcacgaagaaaaaccgaagccgataaccagtgttt

SEQ ID NO: 83158 - DNA, 248 bp, Glycine max
  Clone ID: 700957626H1
ccctaacacaacaccggcaatgcagacgctacttctgccggcaacacgcgccggcagcttcacggcagttcctctgtcagcctccgccgtcgcctcccctccactccctcaaccatttctcagcccgaattccttcccctcactccttctcaatcgggctcgttcatcttcctcttttagttcctccatcgctcgtcaaccatggaagaagcttcccttcaccgcaagcgcttcttcgcaagtgtctc

SEQ ID NO: 83159 - DNA, 140 bp, Glycine max
  Clone ID: 700957627H1
acattggtgagaagaaattgaagagagagagagagagagagagagagagagagagggttggattggttttcttcttccttttctctaaagggaatctaatctcaatcctcattacagatttcttcattcctctctcagtc

SEQ ID NO: 83160 - DNA, 247 bp, Glycine max
  Clone ID: 700957628H1
acggacgtgacgacatggagcccggcggggaggctgttccaggtggagtacgcgatggtggcggtgaagcagggctcggctgcgatagggctccgatccaagacccacgtggtcctcgcatgcgtcaacaaggctaactccgaactttcatcgcaccagaagaagatcttcaaggtcgacaaccacatcggcgtcgccatcgccggcctcaccgccgacggccgcgtcctctcccgctacatgcgat

SEQ ID NO: 83161 - DNA, 173 bp, Glycine max
  Clone ID: 700957630H1
attcggctcgaggaaagtgcttgtgttgtttgttgctacagttttggtagcatatgaatgccatggctcagactaccagaagttccctctccaaatgaaaactgggtttggtgggcaatacagcaatgaggtggcatgtgccagttggaggcttggcgtggaagcaaacaacg

SEQ ID NO: 83162 - DNA, 245 bp, Glycine max
  Clone ID: 700957631H1
gttctttggaagctgtactgttatgtgttcctgttgattatcaatgtgtggatctgtctttgtacaaggatagtcaaatcgtcctgttactaaacaaagctactaatacatctgaaagtgctggagatggttgtatgatgattctgcaagtaagtgatctaccatatgtctctatgtcaagatctgcttgtatagatgtttggaggttaccagaactaaaggattctgtcgcttacctgaatatt

SEQ ID NO: 83163 - DNA, 96 bp, Glycine max
  Clone ID: 700957632H1
aaaatggctaggggactaaagaagcatttgaaaaggctcaatgctcctaagcattggatgcttgacaaactgggtggtgcatttgcgcctaaaccc

SEQ ID NO: 83164 - DNA, 163 bp, Glycine max
  Clone ID: 700957637H1
gtatagtgcgggagacagtagcaaatagaaccaagccaacaatgggtaccgacaagccaaaccgggtcgggtcgtttatatacatcactgatccgattcgtgttttcctctccggcgcgtcgaaagacgcgactctctccgacgagcttcgacgaacatcctc

SEQ ID NO: 83165 - DNA, 130 bp, Glycine max
  Clone ID: 700957638H1
aaagaatcaagcgtttcgtgaattggattctctgcaaatcaggatctgctgcttcagggcttcactgtttgtcttgtagcttcttctggaggtttctatggagagtagtggcaagatggaagactatgaa

SEQ ID NO: 83166 - DNA, 247 bp, Glycine max
  Clone ID: 700957639H1
cttagaaatcttgatgaggccaaggttgcttttccttgatgaaccaaccagtggacttgacagtgcttcagctttctttgtgacgcagacactacgtgccttggcaagggatggaagaaccgtgatagcctctattcatcagccaagcagtgaagtgtttgagctatttgaccaattatacttgctctctagtggcaaaactgtttattttgggcaagcttccgaggcatatgagttctttgcacaa

SEQ ID NO: 83167 - DNA, 239 bp, Glycine max
  Clone ID: 700957643H1
ggaaagggtgtgagaagagaatggagagtaaagaggaagatgttaacgttggagcaaacaagttctcagaaaggcaaccaattggtacagcagctcagggtggtggtgacaaggactacaaggaggcacccccagctcctttgtttgaacctggtgagctcaaatcatggtccttctacagagctggaattgctgagtttgtggcaactttcttgttcctctacattaccatcttaact

SEQ ID NO: 83168 - DNA, 124 bp, Glycine max
  Clone ID: 700957644H1
caaaacaaataaagctatgtatagcttgcaggaaaggcctcctgggtctcttttgtggtttctattattagcaattaattgcgcacacaaatgtgggtcatgtgacgggatggattctagctat

SEQ ID NO: 83169 - DNA, 155 bp, Glycine max
  Clone ID: 700957645H1
tcttgtgttgtgtccctcttttaagctatttccttctcttaacacaattggttgtgccaattgccatagtcaccaaccaattaacaaaggtatatatatcatcatatcatcaccaaatgaaaagtattgggttgttttttcttgtggtggtggct

SEQ ID NO: 83170 - DNA, 232 bp, Glycine max
  Clone ID: 700957646H1
cagaagcagcaaaagcagctgagaaaaatgctcttgaccatattacagttttaactgaaaggactactgctgcacgtgcatcaacatctgaatctggtgctgtgattacgatctcaaaggaggagtttgactcactaagccataaagttgaggagtcagataaattagcagatatgtaagtggctgctgccaaggcacaggttgaagctgtgacggctagtgcaaatgaggc

SEQ ID NO: 83171 - DNA, 243 bp, Glycine max
  Clone ID: 700957647H1
caaattctttgagttgaacacaggggccaagattccttctcttgggttagggacttggcaagctgaacctggtgttgtagctgaagctctcaccacagccattcaggttggatacaggcatattgactgtgctagtgcgtataagaatcaagcagagattggttctgctcttaagaagctttttgatgatggtgtggtgaagcgtgaggaacttatggatcacgtccacactctggtgttcag

SEQ ID NO: 83172 - DNA, 124 bp, Glycine max
  Clone ID: 700957648H1
ataaaatgtcaaagacaagtttccttgacttccaatacaacctctcaaggagaaaatacctgaggaagccatcgcgcctgttctcccgggacaggcagaactctgggcttaagggtgtgtttct

SEQ ID NO: 83173 - DNA, 207 bp, Glycine max
  Clone ID: 700957649H1
caatgtcattaatggtggatcacatgctggaaacaaacttgctatgcaggagtttatggttcttcccgtgggagcttcctctttcaaggaagccatgaagatgggtgtagaagtatatcacaatttgaagtctgtgattaagaagaaatatggtcaagatgcagtaaatgttggtgacgaaggtggctttgcccctaacatccagga

SEQ ID NO: 83174 - DNA, 151 bp, Glycine max
  Clone ID: 700957651H1
ctcctctctctctaaattcaattatgtcgtttaagaaaacgctagcccagcggcttctcaacatcacaaaaatctccaattaccgcatttcctcctccgtagtccgttccccgaacccgacaaaacctgacattgctccggatcccggaga

SEQ ID NO: 83175 - DNA, 135 bp, Glycine max
  Clone ID: 700957656H1
cgcggttttagttgtgatcaataagtcgatagttagaacaatagtcttggtataaggaccttgccaataattttttagttctgattcacagagctaagacagttccgtcttagactttaaaagttttgatattta

SEQ ID NO: 83176 - DNA, 236 bp, Glycine max
  Clone ID: 700957660H1
cagttagtacaaaaaagggttacttcagcttccacatatcttgaagaagtgatcaatgggcaagtctgtagttgagaagctactttggatggcaattgtgtgcttggtgctgggtgtaatttccattactcccaaggcccaagcagcagtgacatgcaaccaggtggtgagcaacctcaccccatgcatttcttatgtgctcaatggtggcaaaaccgtgcctggcccttgctgca

SEQ ID NO: 83177 - DNA, 118 bp, Glycine max
  Clone ID: 700957663H1
ctttgcaacacaacaaaaaagggcaacacagagagaagcgtcttaataaacgctcttctctgaaaaacctgatttcttctcttcttctcttctctttcgtttcgatcttcgatctctg

SEQ ID NO: 83178 - DNA, 262 bp, Glycine max
  Clone ID: 700957665H1
ggatggcttcggtgtcaacacctacacccttatcaacaaggccggcaaagcactctatgtcaaatttcattggaagaccacctctggcgaaaagtctcttttggacgacgaggccatcagggttggaggatccaaccacagtcatgccacccaggacctttacgattcaattgctgctggaaactatcctgagtggaaactctacatccaaacattggatcccgaaaacgaagacaggcttgactttgacccccttgatgtt

SEQ ID NO: 83179 - DNA, 100 bp, Glycine max
  Clone ID: 700957667H1
ataatttcagatctcgtcgatcttgagcttcaacaatggcgaaaccaaggtactctcgtcttccacctcgcaagtcatcgtcgtcttccacgctgattct

SEQ ID NO: 83180 - DNA, 238 bp, Glycine max
  Clone ID: 700957671H1
caaaaaccgtacaacaaggttgtttttattttgttttgtgttttctctctaatcattcgactggccaaagaaggacctaactgggacgggttgctgaaatggagcattgctcactccgatgggactagccctactcgcaatttaagtgaggaggatcgaaaatggtttatggaagcgatgcaagcacagaccattgatgttgtaaaacgtatgaaagagatcacacttgtgatgcaaa

SEQ ID NO: 83181 - DNA, 235 bp, Glycine max
  Clone ID: 700957673H1
gatggttaggactctgtaggctgatgtagacaacactcataccgttggaaagaaggatgctgctggccatgttgcttaatttagttcttgcttcctttgtcttcttgagttttatcagagacgggagtgcagggatcactagctctttcattcggtcagagtggccggcagttgacatcccccttgatcatgaagcatttgcagttccaaagggttataatgcacctcaacaagt

SEQ ID NO: 83182 - DNA, 231 bp, Glycine max
  Clone ID: 700957674H1
gtgacacaaatctagggagcgctactctaaaagttctattagattcttcaaaacatggccatgcatcgcgagtcttgggcttttgtcttcggcgttatgggcaacatcatctcctttggagtgttccttgctccattgccaaccttttaccaaatctacaagaagaaatccactgaagggttccagtcacttccttatgttgttgcactgttcagtgcaatgctttggatt

SEQ ID NO: 83183 - DNA, 231 bp, Glycine max
  Clone ID: 700957678H1
tagacagcagatagagagtatgaacgaatcaaggaaaataataggagtgaacttgaaagaattgatcaagagaggaatagtgacttcctaagcatgctgcgagggtttgttgcaaatcaagcaggctatgcagagaagacagcaactgtgtgggagaagcttgcggaagaaacggctgcttacttgagagacagcagctaaaatgtacttggctgtaaattcttatttttg

SEQ ID NO: 83184 - DNA, 232 bp, Glycine max
  Clone ID: 700957680H1
taagaagaaagagaagagaataatatgaagagccatgtctcagaaagggttcagccttttgccaagtgcctccagagttgagatcacctcggaataaaacttggagaattattacaattttcaaggtgacaaaagtgcatgtcagatttttttatccttataaaatcgaagacaagtatggtaatttacaacagcctgctcaatcaagacctcctggtaaaggagatgtcat

SEQ ID NO: 83185 - DNA, 237 bp, Glycine max
  Clone ID: 700957683H1
ggtggagctgccacagctttaacgtacgatgaagccctgggacaacctttgagcctccctggtgctggggactttgatgtgaacggttttgtggagagtgtcactggctttgcagctgaaaaccctgcaattcttgctgggggagtagctgttttggcagtgccattggttttgtctcaggttcttttcaagaagcctaaggcttgcgggtgttgagtctgccaagaatgcttatgc

SEQ ID NO: 83186 - DNA, 237 bp, Glycine max
  Clone ID: 700957684H1
ctgaaaaactctgttgtcatgataatctgtctgcaacggttgaagaggagcaacgggaagatggctccgaaggcagcaacaactattctcctgaagatagatgtctaagtcaaaacacaagtagtgaggaaaactcacctgtgatttcttgcccagctagtcctcctaatgaggccaatgatcacaaagatgactcccagaacagtagtgttgggtctaatatatcgcttgatataa

SEQ ID NO: 83187 - DNA, 109 bp, Glycine max
  Clone ID: 700957687H1
gaaaaacaaaaccctcactgagcgctgctgctttgagagagagatggctccgaaccttgaatgtcgtatgtacgaagcgaagtacccggaggtggacatggcggtgatg

SEQ ID NO: 83188 - DNA, 136 bp, Glycine max
  Clone ID: 700956911H1
ctagattctgctcttaaacgccgtcgttttcaaactctttttttccccttcgcttctctgtctttgtaaccgaaaggggggaaaatataattaacaccgatttcgcgaccaattcttcttctgcgttgaattggga

SEQ ID NO: 83189 - DNA, 86 bp, Glycine max
  Clone ID: 700956912H1
tgcatcgtggcaggtgtggtatccggcgtcgttttgatctcactcatcatccttttcctcatcgtcttcttccgacgcaagacaat

SEQ ID NO: 83190 - DNA, 121 bp, Glycine max
  Clone ID: 700956913H1
gtaaaatccaaaccaaaatggcggaaaaagaagccgttgaagaagctcagagcaagttccgatcagagttccttcaagtcctgcgtagtaggcgacccgctcaagttccactaaaagtcgg

SEQ ID NO: 83191 - DNA, 276 bp, Glycine max
  Clone ID: 700956914H1
cagcatcatcacatgcacccgcgattcctacgatcccttcccatggtctcttctctgcaccctcgctttaccttctagaaccttccctcagatctcaattccccttccgctttctcctttcatggaaatggcttccactccccgcaccgtcccagagatcttcaaggactacaccgcccgcagaaccgccatcgttcgcgctctctctcaagatgtggatgaattctacggactctgcgatccagataaggagaattgtgcctctatggacatccg

SEQ ID NO: 83192 - DNA, 228 bp, Glycine max
  Clone ID: 700956916H1
acaaggcagaaagcaagctcatcctagagttttaaaaatggcagcagcctcctccatggctctctcttccccatccttggctggcaaggccgtgaagctgggcccatcagcccccgaagtcgggagggtcagcatgaggaagaccgtcaccaagcaggcctcctccggaagcccatggtacggcccagaccgcgtcaagtacttggggcccatctctggcgaagcccc

SEQ ID NO: 83193 - DNA, 280 bp, Glycine max
  Clone ID: 700956917H1
aattcagttgcatcacatgttcctcaatcacatgttggccattttcacccagtgccgtcaatgtcacctgtgcagcagtggcaaaatcatcagtctgtgtcagagggttcacaggtacctgtacaggaacattcttcaccatctcaaactgatcaacatttgatgagatcagatgctaagtttagctatgaaatgtctgttaatgggaaaactcttcatagagactatctggatgctcacatccagcaaggtgaggaggcacaaaccatgattttttcag

SEQ ID NO: 83194 - DNA, 275 bp, Glycine max
  Clone ID: 700956920H1
gtcagcctgagatcatggcgaaagttcgcgtggctgtagatagaccatatcactcctccgaatcaagttcctgcattaccattctgggcttctctagcgttctaatgtagggtgtagatgagaatggtgatggtagcatgagagttatttctctgggtatcggtgactctactctcatcacttattttcgcatctcatatgtagctgaaaaagcagttgcagaagcacttcagtcacacaggtttcgtggctatgctcccactgcaggtcttcca

SEQ ID NO: 83195 - DNA, 274 bp, Glycine max
  Clone ID: 700956922H1
attctctcgcatctcaatacccttttgatttgtgaaaggatcgcaaacatgcttgatcaggtccaacaccctacaatcatggacaaggttgctggccagctccatctccgttctggtgtttctggtattaggagttatgaaggagcctactgccaccccacaatgtaccatcctcctcttttgggaattactcgaatgctgcattgcagtatcctgtgatgccctcatgcaaagctactatggatttgtctgctgctgcaacaactgcctcccc

SEQ ID NO: 83196 - DNA, 277 bp, Glycine max
  Clone ID: 700956924H1
agaacaccacaaaaacatcaccctattctctattgtgtaatcaaatatcattaaccatccatggcacaaagaagcaagtcatttcgttttaggatcccatggctatcagtaccatctgaatcattcgctcgtcgtacaagagaaagaccaaaatcccctccccactcagacacaagtgtgcctattcatagaccatctaagccttctgtgatagccccttcagagttatctcctcttagtcccacgaaaactgaggaagccccaagagctgaacctc

SEQ ID NO: 83197 - DNA, 276 bp, Glycine max
  Clone ID: 700956925H1
atcatcttcttcgtctttcctttgtctctcttctttcccctctctttcgagggtttttctttttcttttttcccttttgttatttttcctttattttgtttgtttctttctcttgtgtttcagttttgcgtccatgtcctttgaatccccatttattcttcttcttctgcgaccctaaccctagaattgaagatgcagcctcagaggttaaggcagcaagccatgatgcaaccatctctctaccaccaccctgctctacttactcctcctcagata

SEQ ID NO: 83198 - DNA, 86 bp, Glycine max
  Clone ID: 700956926H1
cttgagtggtgcactcgcatcagcgcagaggcacctgcagagttgcgattgcgctctttccagatctcgtagattccacacaacat

SEQ ID NO: 83199 - DNA, 275 bp, Glycine max
  Clone ID: 700956929H1
gtcgtggaagatgagcaacgtgttcgagggttacgaacgccaatactgcgagctctcggcgaatctagcgaaaaagtgcactgccgctggtgctcttaatggagagcaaaagaaacagaaagtttctgaagtaaaggctggaattgatgaagcagaagctttgattagaaaaatggaccttgaggcaagaagtttacagccaaacatcaagggtgtgcttcttgctaagttgcgagagtataactcggatctcaacaatcttagaagtgaagtta

SEQ ID NO: 83200 - DNA, 118 bp, Glycine max
  Clone ID: 700956930H1
gtttagttatctactctgttctgcatgtttgttctctcaacgactcctccgcgaaagagcatgatgcaataaattggtgaggttgaatcccggggttgaagcgttgcagacatcacgg

SEQ ID NO: 83201 - DNA, 116 bp, Glycine max
  Clone ID: 700956931H1
acataatccacatggacgagaacaagatgcccttaaccttcacagaccacctcagctggttcgacgactcactcaaatcagcgtccccatccgcggagattctctacacttaaaaa

SEQ ID NO: 83202 - DNA, 222 bp, Glycine max
  Clone ID: 700956932H1
gtgatttcagtgagtgatcggtgttcacttgatctcatcataatcgtcagcgtcaattgaagaagatgccgatcagaaacatcgccgtcggaaggcctgaagaggcgactcaccccgacacgttgaaggcggctttggctgagttcatctcaaccttcatcttcgtgttcgccggctcaggctccggcatcgcctacaaaaagctcaccgacaacggcgctg

SEQ ID NO: 83203 - DNA, 276 bp, Glycine max
  Clone ID: 700956934H1
acataaacaaaaaaaataaactggggagaagcatgttgttgatgttgggactatgcttcctattgttctctgcatttccacttgcgttctctgacagatgccacccacaagacacgaaagcgttgctccaactccagaaggacctcggcaacccttatcacatcatatcctggaacgcaaaggaggattgctgcgagtggttctgctgcgttaagtgtgacgagaaaacaaaccgcgtcattagcgttgccttatcatccccttttccagacacca

SEQ ID NO: 83204 - DNA, 274 bp, Glycine max
  Clone ID: 700956935H1
ggtttggttgcgatgcggtgtgttgcgaatcactgtccaatcccgatcgcttgatccagacagtgaatcagactcagaatcagaatcagaatcagagagaaacgatgagggcagtaagtgcgttaatggtggctcggatgttgacgcgggaccactcgctccctgtccttggcaacgaaagcatacccttcggatcggtgtggtggttcgcctatgccggcgtctcctgtttcctcgtcctcttcgctggcatcatgtccggtctcaccctcgg

SEQ ID NO: 83205 - DNA, 151 bp, Glycine max
  unsure (1)..(151): unsure at all n locations
  Clone ID: 700956936H1
gaaagctctcagtcctgactcaaaggagaataaagaanagaaatcaagtatttctaagaagaaatggtttgggaagcaaaaattggagacttcagtctcatactcagaagctcataaagcaccaccaccaccgcgatctattcctcaagac

SEQ ID NO: 83206 - DNA, 273 bp, Glycine max
  Clone ID: 700956939H1
aggctacagagttgaggcttggtcttcccggattccaatcgcctgaaacggtaccggatcttttctctttaagctcaccaaagcttgatgagaagccactcttccctttgcttcctactaaagacgggatttgctcgtcggggcagaaagctgttgtttctggcaacaaaagaggttttgctgataccatggatgggttttctcaggggaagtttgctggtaatacagggatgaacgcggtgctatcacctagaccttctggagctcaacctt

SEQ ID NO: 83207 - DNA, 273 bp, Glycine max
  Clone ID: 700956941H1
aagatcgtgactatcttctctctccaactggggctcaggtgaaagtttctgatcttgaagggaaagtagtgggtctattattcgctgcgaattggtacccaccttgccgtggattcacccaagtcctagctggaatctacgaggagctaaaaagcagagtccctcaatttgagattgtgtatgtgtcctcagatgaggacttgaatgcctttaatagcttctatggaagcatgccctggattgcaattccgttctctgatttggaaacaaaga

SEQ ID NO: 83208 - DNA, 274 bp, Glycine max
  Clone ID: 700956942H1
gcttcttccgcatggggtgttccgcggttctgctttccaaccgtcgaagggactatagccgcgcaaagtaccgccttgaacacattgttcgcacgcataaccgtgccgatgaccgcagcttcaggtgtgtgtaccaagaggcagatgagcaaaaactaaagggactaaagatcagcaaagacttaattgaacttcgtggtgatgctctaaaaaccaacatcaccacactaggacccttggtgctacccttttctgagcagcttctcttctttag

SEQ ID NO: 83209 - DNA, 267 bp, Glycine max
  Clone ID: 700956945H1
caaacaacagagtttatttctttttggttccttggttcacgctggctgcaaggcttgtgtttggtgggagcagcttctcaccgtgacgctgctctacgaagacgacgacaacctcgtgttccaacatcaaataatgggaaaaggaaacatggaactcgagacaaacaaggtctatgactacgaggatgcacgaggggacgttgaagtcccagataccgctcatcagataagcactgattcatggtttcaagtggcttttatccacac

SEQ ID NO: 83210 - DNA, 269 bp, Glycine max
  Clone ID: 700956946H1
ctcgagcgaatcggctcgagaaaatttctcttccgttcgccggaaacaaaaaacctctgtcggctccaattcgaaggcggttcaatgtcattgctatggctccccctaaacccggtgggaaggccaagaaagtggttggacttataaagctggctcttgaagctgggaaggctacacctgctcctcccgttggccctgctcttggttccaagggtgtcaatattatggctttctgtaaggattacaacgctagaaccgccgacaagccc

SEQ ID NO: 83211 - DNA, 136 bp, Glycine max
  Clone ID: 700956947H1
aagccagattatgcgtacctcaaaaggatatttcgtgacctgtttatccgtgaaggattccagtttgattatgtctttgactggaccattttgcagtatcagcaatcacagctagccactcctccaacacgggcca

SEQ ID NO: 83212 - DNA, 273 bp, Glycine max
  Clone ID: 700956950H1
ggcggagttaggtgcgagtgagtatgaacaatgaaatgaataatttggaccactctctggtcaagatcaaaccatacaacttctctctcaatctaaatcgtcaagggaccatgcaaacatctttaaccagaaggcctctaacaattcaagctacgtatagtgatggtggaaggcccagcagtgctagtgtatttgttggtgggtttctcttgggaggattaatagttggtactcttggttgcgtgtatgcacctcagatcagcaaggccctag

SEQ ID NO: 83213 - DNA, 124 bp, Glycine max
  Clone ID: 700956953H1
cggaatcatcggaatctgacagtgacaacaactcctcaaaaaccaacaattgtcaaaccctcaatgaaacggcgctgtttcttgactacgctcttgcgcaggcccagctttaccacaaggcctt

SEQ ID NO: 83214 - DNA, 274 bp, Glycine max
  Clone ID: 700956954H1
ctttgcgcagttccctacctctcctctacctcctgcagatcttcgtcaagaccctcaccggaaagaccatcaccctcgaggtggaaagctctgacaccatcgacaacgtcaaggccaagatccaggacaaggacggaattcccccggatcagcaacgtctcatcttcgctcgaaagcagctcgaggacggccgtaccctcgccgactacaacatccagaaggagtcaacccttcaccttgtccttcgtctccgtggtggcatgcagatcttcgt

SEQ ID NO: 83215 - DNA, 265 bp, Glycine max
  Clone ID: 700956955H1
taagatccaatcaggattcagtttcatggggtcatcagaacttgactcggtcacataagtgagtcttcaagagttgaggaactctgccctcctacgctctgcagtgcgtgtgactcatgtcaattgtgacgactcattcgatacggcattccacgttgacgtgctctccgtaggctcaatggatgggactcagagccttctcatattctcgggagcacccccgggacactggtcacagattagacagttggtgaccttccacaag

SEQ ID NO: 83216 - DNA, 273 bp, Glycine max
  Clone ID: 700956956H1
aaaatttaaagaaatcaacacacacaaacacaacaacatatggaggcgctaagggtgcaaaccatagcttccaaatccaaagatgctgccatcccagccatgtttgttagggcagagacagagcaaccaggcatcacaaccgttcaaggggtgaaccttgaggtgccaattattgattttagtgacccagatgaagggaaagtggtgcatgagattttggaggcaagtagggactggggcatgttccaaattgtgaaccatgacatacctagt

SEQ ID NO: 83217 - DNA, 133 bp, Glycine max
  Clone ID: 700956957H1
ggcgctttaactattcggcaaccacttgtttgccaatactatattactccttcatcccttcactttatctccttaaagccattcccgtgtttccaaagatgtctagcccatggttcatacctttcgcatatgt

SEQ ID NO: 83218 - DNA, 85 bp, Glycine max
  Clone ID: 700956958H1
ctacaaacaagaagcaaaatgagttatccactatctttgagattggaaagcctgaagtaaggcgtggccaagggcactgtaagct

SEQ ID NO: 83219 - DNA, 172 bp, Glycine max
  Clone ID: 700956963H1
caaagatcccgaggctaaacaaccagaagattgggatgacaaagaatttattcctgatcccgaggataagaaaccagaggggtatgatgacatcccaaaagagctcccagatcctaaagccaagaagcctgaagattgggatgatgaggaagatggtgagtggacaccccta

SEQ ID NO: 83220 - DNA, 272 bp, Glycine max
  Clone ID: 700956964H1
ggatgaagctcaagaaacatttcgtcaaaggaagacttgatattgctcgccaaaagctgattgatgagcttctaacctttagcatgcttagagaggtcaaaatcgttgttgtctttgatgcaatgatgtctggactccccactcacaaggaagacttcgctggtcttgatatcatattctcaggtgaaacatgtgctgacacatggcttgaaaaagaggttgccagcttaaaggaggatggttgccccaaagtctgggtagtcacttctggt

SEQ ID NO: 83221 - DNA, 273 bp, Glycine max
  Clone ID: 700956965H1
atgaaaggaggaaagtccaagaccgaatctaagagagccgatgccaaacttgctgtgaataagaagggcgccgccaccaagactaggaaacccgccggaaaggggaaggcagcgaaagatcctaacaagccaaagaggcctccaagtgctttcttcgttttcatggaggaattcaggaaggtgttcaacaaggaacatcccgacaacaaagcagtgtctgctgtgggcaaagctgctggagcaaaatggaagacgatgtctgatgctgaaaaa

SEQ ID NO: 83222 - DNA, 87 bp, Glycine max
  Clone ID: 700956966H1
gaagatcgatcatggcttctagatcctgtctatcctctttctccctctccaatttctctgcacctcttcacatttccatttgttctt

SEQ ID NO: 83223 - DNA, 263 bp, Glycine max
  Clone ID: 700956973H1
gccgatctcgctgagagtctcgaatcgcaccggtgaccggaggagatggtgaattccatggtggaacgcgccacgagcgacatgctcatagggcctgattgggccatgaacatcgagatctgcgacatgctcaatcatgaccctgggcaagcaaaggatgttgttaaaggtatacagaagcggattggaagtacaaattcgaaagttcaacttcttgcactaactttgttggacgaaatcatacagacatgtggagatattgt

SEQ ID NO: 83224 - DNA, 80 bp, Glycine max
  Clone ID: 700956974H1
cggtcttgatcctgaatatgtggaagagaattcaggtacaaaagaggtttgtgaccaagatgcaggagcaggacagatac

SEQ ID NO: 83225 - DNA, 75 bp, Glycine max
  Clone ID: 700956975H1
aatttatagtatagctcatacaagggtgaacaatggcacctaacaagaggttggaatactagttgatttgatagc

SEQ ID NO: 83226 - DNA, 266 bp, Glycine max
  Clone ID: 700956976H1
cgaagttcacatctgtttggaataagcttcttttccatacaattgactatgtcaaattatggctcagttattgtcaccagtatgcatggaggctctgcaaatccacaatccatcattgcctctttgttcaagaagctcatggcggatgctggtgaagggtgcaagtccttgcacctttctgacacacagtggtagtaagcgaagagggtttggcaaagtaagagttactgctgaagactcagtttctccctctgagaccattgcag

SEQ ID NO: 83227 - DNA, 264 bp, Glycine max
  Clone ID: 700956977H1
gtggagaggatctgatagaacagataaaagcagggttcatggagtttgataaactaattgcttctccagatatgatgcctaaggttgctagcctagggaagattctgggaccaagaggactgatgccaaacccaaaagctggcactgtaacaccaaatattccccaagctatagcagaattcaagcaggggaaagttgaatacagggcagacaaaactggaatcgtgcacttaccttttggaaaagctgactttccagaagagg

SEQ ID NO: 83228 - DNA, 269 bp, Glycine max
  Clone ID: 700956978H1
gtcaaatacaagtttgcttgatttccaatacagcctctcaaggaaaaaatacctgaggaagccatcacgtctgttctcctgggaccggcagaactcggggtcgaagaatgtatttcctcagcctaaggctgatgagatgaagcaggtgtttgacaagtttgattccaataaagatgggaaaatttctcaacaggagtacaaagccaccatgaaggctctaggcatgggggactcggttcatgaagtgccgaatattttcagggtggttg

SEQ ID NO: 83229 - DNA, 210 bp, Glycine max
  Clone ID: 700956980H1
gattctccaccatctccctaaagagccatcaaactttataaaaagaaaaaacataaaagcatttgaacgccatggttttctcctctattccagtctttgtagatcctcccaattggcagcagcaaccaaataaccatcctcaagcaaataataatggtggtgacaacactcagcttcttccacctttgccaccacatcaatctcatgtgg

SEQ ID NO: 83230 - DNA, 187 bp, Glycine max
  Clone ID: 700956985H1
gtctggaattgccgcttgtttgaaaatgtctctctttgctgcattttccatttgtaaagttgccaaggatgcagctggagttgcaggaaatgtgtttgcttttgggttgtttgtgtctcccatatccacatttaggaggattctcagaaatgggtcaacagagatgttctcagggttgccatatatt

SEQ ID NO: 83231 - DNA, 269 bp, Glycine max
  Clone ID: 700956988H1
ctcattctgggcggcgatagttttatcgttctctatctccaagatggtcggagaacacggtacgatgtcacttgcctccgatgatcagaaaacaccacttcttcccgtgcacgagccaatggaaggaacacgcaccagcgtctccttcagcatcaaaacaattctaacactggaaaacttgtacgtgattctgggacctatgctgtctcttttcatatgcctcttcgtgaagctcgacgcgccacccacaagccagaaaatgcttggtg

SEQ ID NO: 83232 - DNA, 264 bp, Glycine max
  Clone ID: 700956990H1
attctccaattctccttctccttccaagttaatcatgggtttcaaatccctttttaacatgaagaagaagaaacttctgaagacgatgtcgtcttcgtcctcattgccccacgcgccaccggtatcgttgcattcatcacgcgcctccgtgatggaggaccttgaatatgtcttcaaaaagttcgacgcaaacggcgacggaaaaatctccgcttcggaactcggctccctgatgaagagcctgggccagcccgcgaccgaaga

SEQ ID NO: 83233 - DNA, 265 bp, Glycine max
  Clone ID: 700956991H1
gcaaattaatcaaacatggctagggttagtgctttgtttcactctttgctcttgatttcttcccttgtattggcttctcaaatccatgtttcctctgggaaactagtccctggactatcatggaattactatttgttgacatgtcccaagcttgagaggattataaggaagcatcttgaggatgtcttcgagaaggacagtggagtagctcctggcatacttcgactcttcttccatgactgctttcctaatggatgcgatgcgt

SEQ ID NO: 83234 - DNA, 265 bp, Glycine max
  Clone ID: 700956992H1
gtcagaaggaagagataaatccatcgatgagtcacatgataaaacctttgatattaattcttctccaccacattccaatcagaggtttagcactggagcatcaattaactcacccactaatcaaaacatcagttctcaccctcgtggatactttcagcattccgaacaaattggttcagagttctcaacagttccccttacatcatcagatagtaaaactactagttcaagacttcctagatactaaatatacatttttttccat

SEQ ID NO: 83235 - DNA, 182 bp, Glycine max
  Clone ID: 700956993H1
catagaattttcgagagagagaaaaatcaagaactcggaatcagggtattctctcagattcgtgaaaatctcgaacgaggaatacgatttaagccttaggtcgattcccttaagatcaaagcctaaatctaatattcgcccgtcccaatttagttcagagataagagggatttaaggtttcg

SEQ ID NO: 83236 - DNA, 141 bp, Glycine max
  Clone ID: 700956994H1
cgcttatggtggatacctaggcatccagagacgaggaatcgcgtagttcgcgacgaaatgcttcggggagtgcgaaataagcgtatatccggggattcccgctataggtcagacctttcgaactgctgctgacatccacgg

SEQ ID NO: 83237 - DNA, 261 bp, Glycine max
  Clone ID: 700956995H1
gaacaacagccatgcggcggatgcaccggcggacggaccatccgacgacgacgctgattcggaagatcagaaggctgcggatgaagacagcaatggagtaagcggattgcacgtgagattcttcatggtcttcttcagtttaattatggcttttttggctctatgatacacccacatggattatggagtgtcgctactatacacttgtttcaattaagattcttttctttctttaatatatgtcaaggaaataaaacgctg

SEQ ID NO: 83238 - DNA, 238 bp, Glycine max
  Clone ID: 700956996H1
gccagaaagacttgcttggtacaactacaagcttcttggaataagggtcattaggaagggtatccctccacccccagcaaagaagggccaaagtggagtcctatttgtatgcaaccacaggacagttttagaccctgtggttacagctgttgcattaggaaggaaaattagctgtgtcacatatagcataagcaaattcactgaaataatttcaccaatcaaagctgtggcactctct

SEQ ID NO: 83239 - DNA, 271 bp, Glycine max
  Clone ID: 700957001H1
ggttccgatactctgaagaccgtgaagtactctagggttttgactaacgtgggagctccgggaacgtacaaagcttcggtgatgtcgttgggggattcgaatgtgaagactgtggtggaaccgaatacgttgagtttcacggaattgtacgagaagaaggactatacggtgtcgtttacatacacttcgatgccgtctgggacgaccagcttcgcacgtttggaatggacggatgggaagcataaggttggtagtccaattgcgttcagct

SEQ ID NO: 83240 - DNA, 273 bp, Glycine max
  Clone ID: 700957003H1
aatttctcagttctcacactcattccgtgctctaaatctcaaattctagggttagggttcccaatttctccgccaatcagaagatgagttccaccggtggttctaccaagggcggaaggggcaagcccaaagcctccaaatccgtttcaagatcgcagaaagctggtctccaattccccgttggaagaatcgctcgattccttaaggctgggaaatacgctgagcgtgttggtgctggtgctcctgtgtacctctctgcagtgctcgagtatc

SEQ ID NO: 83241 - DNA, 270 bp, Glycine max
  Clone ID: 700957005H1
acaaattctcaaatccaaatccaattccaattccaattcccaatcttctcaaaccctaattcctcatcttgaaaatgacagaaatcttgcacatccagggagggcaatgcgggaaccagatcggagcgaagttctgggaggtgatatgcgacgagcacggcatcgaccacaccggaaagtacagtggcgactctgaactccaattggaacgcatcaatgtttattacaacgaagcgagtggcggaaggtacgttccacgcgccgtcctca

SEQ ID NO: 83242 - DNA, 273 bp, Glycine max
  Clone ID: 700957006H1
gggtaacccattaaagaagcatgtgattagcatttttttttcaagtttgtatattcagatatcttgcgtcctaacgcttcataaattcgaaggtactcatattgcatttaaactactatacactcacagaagcctctgcgccacagtctgcatgcctcagcaaaatgcacttgtcactgagggaaattgcattgacacttcattgataacttctagccaaagctcttttatgagaaaatgatttaacgtctttaattttctccaaacaaagta

SEQ ID NO: 83243 - DNA, 270 bp, Glycine max
  Clone ID: 700957007H1
agaccatttaaaagacttgggttgtgctgcatggactgtttttcactttgccattactaccctgcatgccctgaaccagatttaactttttgaaccacaaagcattctgataattgtttcctcacagtgcttctccaggatcatattggtggcctgcaggttctttaccagaacatgtggattgatataaccccagaacctggggctcttgttgttaacattggtgatcttctacagcttataacaaatgacagattcaagagcgtagaa

SEQ ID NO: 83244 - DNA, 270 bp, Glycine max
  Clone ID: 700957008H1
gcagactgagcgtgtgactcagtgtgggaaaacgatagataccattaccatgttggttggataactgagagatgatgatgatttcaacttcaaccatggctttggcttctttactacccaaaacggcaccgcatgtcctttccctcacaaccccttccgcttccactcccttcatcttacctttcagtttccactgtttgcctcaccctcctcttctctctgccctcaaagctagttcctccggtggcgacgatttacgcggcaagccct

SEQ ID NO: 83245 - DNA, 269 bp, Glycine max
  Clone ID: 700957009H1
ctcaattcaaaagcagcacgttggttctcaccatctaagttttttcatggaactgattggattgaggttactggaattccttactttcctggcgtgccgaaacaccataggcacaaaaagacaatacttaattggcaataaaagtaatgagttgcgaaagcaagcaatataaattaattaaaaagtaatgattgtgcttctttattctttaattatgtttatttcattacttaactttagagttagctacattttgttatctcaaggaa

SEQ ID NO: 83246 - DNA, 226 bp, Glycine max
  Clone ID: 700957010H1
attgtagcaacagttttcacttttgttccattattagttcttatagaaatatttcttcagcaattatggctagcttgaatgttgcatgtgtggctgtaatgtgcatggctatggtgagtgcaccattgatggtgcaagccgtcacatgcaacgtgcctatcttaccctgatgcagggtggatcggtaacgatcggattcgtgctgtggcggagtgaggaacattct

SEQ ID NO: 83247 - DNA, 267 bp, Glycine max
  Clone ID: 700957012H1
agaaaaactatatcagcgattctcgtgatcttcggcctcgaatcgagaggtaaaagacccaactccgcctctgtttttgtgatcgaaaaccataaaaaagttgtttccgatcactgccttaatcggattcagctgttgttcctcctcctcaatttcgaatattgaaaggctttagttgttgattttggtcaagtctctagtcaacctgtgaattttttattcaagtttaaaaatatatagagcaatgagtgttgttttcgaggaaca

SEQ ID NO: 83248 - DNA, 250 bp, Glycine max
  Clone ID: 700957014H1
caatgtgaatgctgagattgatcctcagaagctggttgaattcttcaagcagtttggggaggttgatgatggtcctcttggtttggataagaacactgggaaacctaagggttttgcgctttttgtgtacaagtctgtggagagtgccaagaaggctttggaagagcctcataagaactatgaggggcatactttgtattgtcagaatgctgttgatggtcctaatgggagcaaggggtatcatcatcag

SEQ ID NO: 83249 - DNA, 172 bp, Glycine max
  Clone ID: 700957015H1
gaattattaaattcaaccgccattacataacactacattcttttgattcactcaatccgttctctgctctctttcttcttctacacccacaccggaggagagaaaaccaatatcactcttcaccgttagggttagggtttcggtttccccctaatccaatcgcgcagagcag

SEQ ID NO: 83250 - DNA, 272 bp, Glycine max
  Clone ID: 700957017H1
actacttcctcttgcttgttctcgtcggtgcaactacagcttctggggctgaactatgtgcagacttttactcatgcacctgcccaaacttgttgcctatagtgaagaaaggagtggccaaagccattcagaaagaaccacgcatgggcgcttccttactccgattgcatttccatgactgctttgtaaacggttgtgatgcatctatactgttggatgatacaagcaacttcattggggagcaaacagcagcagctaacaaccaatcagct

SEQ ID NO: 83251 - DNA, 269 bp, Glycine max
  Clone ID: 700957018H1
gcagcctacagccatgaatgcatttgagttaatctccatgtccaaaggactgaaccttgaaaacttgtttgatactgagcagggatttaaaagggaaacaagattcacctcaaaatcccctgcggatgagataatcaacaagattgaggaagccgcaaaacctcttggctttgatgtgcagaagaaaaattacaagatgaggcttgcaaatgtgaaagctggaaggaagggaaaccttaatgttgccacagagatatttcaagtggcac

SEQ ID NO: 83252 - DNA, 266 bp, Glycine max
  Clone ID: 700957019H1
agctactctgatcaaaacaaggggacatctttgtttgtgatgagcatgaacatgaacatggctctgtgtctgatgttccttgttctgcacatagcttggcttgtagcatcatcggatctccgagctggcttttactcaaaaacatgtccaaaagcggaagtcatagtccgagatgtgatgaagaaagcccttattagggaagccagaagtgttgcctctgtcatgcgcttccagttccatgattgctttgtgaatgggtgtgatgg

SEQ ID NO: 83253 - DNA, 263 bp, Glycine max
  unsure (1)..(263): unsure at all n locations
  Clone ID: 700957022H1
actgatcatatacttttggtagaagacagatagaatttcaaatatagtggattacgtnatttcggaaaatgaatggaagcatgtagtggtctctattgatatttgatttcaaatggaacccaatagaaccatttgttgtgcaaattggactccatgtaatcaagccaaaaagtagcatggtttataaggatcagtgaatcgaatatcatccatgctactttttaaagaaaaacatattgttggacatgggagtttcgcagaga

SEQ ID NO: 83254 - DNA, 265 bp, Glycine max
  Clone ID: 700957023H1
gcctctttgtggaattttccagataccctcatttgtggacataatcactgacctcgccatgttcattactccgctatggattgcgtttatcgtcggcgtcgtcgttggctgggcgtgggaagcccaaatgggtctttcaccccagagacgctcttctcaagtgtctctctcctcgccctcccaatccccataacgacaccgcttttacctaatccggcaccagttcctccgcgcgtgtgaaagacgcgagtaggattcctgtggt

SEQ ID NO: 83255 - DNA, 266 bp, Glycine max
  Clone ID: 700957025H1
tccaaatcctaggacgtacattggctctggcaaggtttctgaaattaagagtgcaattcatgcattgggcgttgaaactgttatctttgatgatgagctgtcagctgggcaattgcgcaacttggagaagatttttggtggagatgtgagagtttgtgatcgaactgctctcatccttgatatatttaatcaacgagcagcaacacatgaagcgtctttacaggtttcattagcacaaatggaataccaactacctcgtctaacta

SEQ ID NO: 83256 - DNA, 266 bp, Glycine max
  Clone ID: 700957026H1
taacaattcaaacagaggagggtcccctaggcttcaaggttcttggtaacattattggtaactcctaagatgaaccggtatgctactttgcttgctgatacaatctcagtagcataccggttcctcttaggagttaccaataatgttactaataatgttaaaaatggtcctgagacccctaacaattcatacagaggagggtcccctaggcttcaaggttcttggttgagaaatattattactggtggtgcaaaaccgtctactag

SEQ ID NO: 83257 - DNA, 267 bp, Glycine max
  Clone ID: 700957028H1
cttcttatagcttcatcccaaaaagctcttttccttctaaatttgattccttagttcagcattctattattatatatggcttcttcaccttcctcagaaaacaaaaacctagagggagtagctggtggtgccggagagaaacccattccacttggtgagaacgttctgcagaagcatgctgcattctttgacttgaataaagatggtgtcatctacccatgggagacttttaaagggttgcgtgaaatcgggactggggttttgctg

SEQ ID NO: 83258 - DNA, 272 bp, Glycine max
  unsure (1)..(272): unsure at all n locations
  Clone ID: 700957030H1
gttcatttgcatttccatttttcacactctctctgctgtggncatgtggacacttcgtcgagcttctcttcgtctcagtacgagccaaggacttaacgcgggagctacccgtgcttcggctgtcaaattagtgccaatcactgttgaagaaaatgaggctggtatccctcagtctcgtcaaatcactcacagtagatttctgtccgctgacacattttgccgcacgggtcgggtgtccctgaaatttgctgtgggcacgcgtgaactttcct

SEQ ID NO: 83259 - DNA, 93 bp, Glycine max
  unsure (1)..(93): unsure at all n locations
  Clone ID: 700957031H1
atcccacacgagacccatgaagntcgtcctgctccttattagtgtctttcacgaggcggaagataagggacagtggcagctcctccacaaaaa

SEQ ID NO: 83260 - DNA, 270 bp, Glycine max
  Clone ID: 700957032H1
gcttttccctcgttgaaatgaaaatgggttcttctttgtggactttgtgtctaattttggcttcactagcctcttctgcattctgtgcctttccacggaggccagtggatgttccattcggcagaaactacgttcccacttgggcttttgatcacatcaaatacttcaatggaggttctgagattcaacttcatcttgacaagtacactggtactggcttccagtccaaagggtcatacttgtttggtcacttcagcatgaacataaaga

SEQ ID NO: 83261 - DNA, 79 bp, Glycine max
  Clone ID: 700957033H1
tttccttcttaaggtcgaaaaagggctgtttcttttgtagcttcaaatgactcttatacaatgtgatagttttggcact

SEQ ID NO: 83262 - DNA, 269 bp, Glycine max
  Clone ID: 700957034H1
caagaagctcaactcagctgcaacgagtcttcaaaagcaacttcctggtcttaagattgcggttttcgacatttacaagcctctctatgaccttgttcaatccccttcaaaatctggttttgtggaggcaaacagaggatgctgtggtaccgggactgtagagacaacatccttgttgtgtaatccaaaatcaccaggaacttgttctaatgccacacagtatgtgttttgggacagtgtccatccttcacaagctgctaaccaagttc

SEQ ID NO: 83263 - DNA, 127 bp, Glycine max
  Clone ID: 700957035H1
tcaagatccgcagaaagctggtctccaattccccgttggaagaatcgctcgattccttaaggctgggaaatacgctgagcgtgttggtgctggtgctcctgtgtacctctctgcagtgctcgagtat

SEQ ID NO: 83264 - DNA, 265 bp, Glycine max
  unsure (1)..(265): unsure at all n locations
  Clone ID: 700957038H1
cccaattgcagtgttcgcttttcactctctttccacacaacatacgaaagagnnagctnncgnactaacgcttcatanattcgaaggtnactcacctgcatttaaactactatacactcacagaagcctctgcgccacagtctgcatgcctcagcaaaatgcacttgtcactgagggaaattgcattgacacttcattgataacttctagccaaagctcttttatgagaaaatgatttaacgtctttaattttctccagacaaag

SEQ ID NO: 83265 - DNA, 123 bp, Glycine max
  Clone ID: 700957040H1
gttgctcaggcatctgtgtcagattccagaattaagctggcagcatgcaccagaggggccagtgcagaggagaacaacttccccccacagaggcaagacactcagcctggcaaagagtacggc

SEQ ID NO: 83266 - DNA, 264 bp, Glycine max
  Clone ID: 700957041H1
acttatgaacctgaggatcccttatttcacccttcaaccaagatcaccacattcctcacttccaaatccaatgcaactttcaagtctgataacagtgttgtgagaactggggaggatttcatggctgctaatgaaactgcgtttggctccattatcaactcaactgatgttgacaacttggctagtgcggaaattattgatgccggcgatgcagctgcggctactcagtgtgatgtgagtggccctattgattgtaaggaccct

SEQ ID NO: 83267 - DNA, 263 bp, Glycine max
  Clone ID: 700957042H1
gatatttcccttctgagctttgattagtgtggcctagttgttgttttctcgatgagaaaggcttcttccactatgcattgcgcatttctgcgcttttgggttcccttgttgctgcttgctagcttcagctatgctccttctgtttcggccacaactgaaatttcagggaatgaagtgaacacagatgggaaggtgataaatgaagagttagcaaaaccaagtctaaaaggacatgatgaagaagcaaagttcaaaggattttt

SEQ ID NO: 83268 - DNA, 199 bp, Glycine max
  Clone ID: 700957045H1
ctcgagcgaatcggctgagattttgaatcagttctggattcctaatcttaagctgattgtaggagctatagagctcagattgactgtagttgcctcaaccagactcatctgtgagtctccagttcttttggatcctgcagcttctgtgtcctggggtaagatggtggacatcatagtcacactcctttctcgggcagtg

SEQ ID NO: 83269 - DNA, 95 bp, Glycine max
  Clone ID: 700957048H1
atggcctccattttcaagctctcaacgcgatcgcgagctgcttccttatcagaagcgcttggccccagagattctcgcttcctgtccttcagtcc

SEQ ID NO: 83270 - DNA, 266 bp, Glycine max
  Clone ID: 700957049H1
tagattagcacttagcatttactaagaaaggataaaggaaggaacactttcgttacatttctctcggccattcctaccttgttcctccttttctccttttctttttcgtattcggggttgctgctttctttcgactctattgtcttcttaataaatacagaaagaaacaaaaaagaaaaaagtttataggtgcctagaagaaaagacaatatagtgtggagcaattacgcttgatcacaagggaaattaaaggtgcaacggttttg

SEQ ID NO: 83271 - DNA, 153 bp, Glycine max
  Clone ID: 700957050H1
ctttctgccttgagcctcacctcttgtgatatgcagcattctagactttccagtaaaaaagaaagaggagaattctgcgcaatccgaggaggtagcgacacttaggccaaaagacaccaacaaacaaatccagcaccgcttccacgttttctt

SEQ ID NO: 83272 - DNA, 263 bp, Glycine max
  Clone ID: 700957052H1
ggcggggctaccgtgagtttaagcatatcaataagcggaggaaaagaaactaacaaggattccctcagtaacggcgagcgaaccgggaaaagcccaccatgaaaatcggtcgccctcggcgtccgaattgtagtctggagaagcgtcctcagtggcggaccgggcccaagtcccctggaagggggcgccagagagggtgagagccccgtcgtgcccggaccctgtcgcaccacgaggcgctgtcggcgagtcgggttgtttgg

SEQ ID NO: 83273 - DNA, 263 bp, Glycine max
  Clone ID: 700957053H1
gaaaaggtatcaaaaagatttctccaactggtgtggcgagtgcaatcgtgagaaaaaggaaaggcagcgctccacagttgctgctaccaaattggatttgttcaggaggcaaggtgaatccactgcataatctgttttgctcagtggatgattgtaaaatgtacctgcaatcatttgtcaatacaaataagctatgattcctgatccaggtgtatgtacaaggtgctctattgagatagttttcttcaagtaagctttggatt

SEQ ID NO: 83274 - DNA, 165 bp, Glycine max
  Clone ID: 700957054H1
catcatcatagtggtgtcctttctctgctctttgcactctctgacacatttggtgccttgtagagcgtgttttggcaggaaggtggtatggcgaaggacgttgaggttgctgagcgtggctccttctctgggatggactaccaggagcctccaccagcaccactc

SEQ ID NO: 83275 - DNA, 262 bp, Glycine max
  Clone ID: 700957055H1
ggggctacccgctgagtttaagcatatcaataagcggaggaaaagaaactaacaaggattcccttagtaacggcgagcgaaccgggcaaagcccaccatgaaaatcggtcgccctcggcgtccgaattgtagtctggagaaggcgctaaaggagttgaaagccaaggcgcaacagaagggaagctttggaggttctgggctcaagaaaagtggaaagaaataagggctctttatcatgattgtatacatccaatattgagcc

SEQ ID NO: 83276 - DNA, 262 bp, Glycine max
  Clone ID: 700957056H1
cactgctttctcctggctcagaaacatcttccatgactgtgctgttcagagttgtgatgcttcactgttgctggactccacaagaaggagcttgtctgagaaggaaacagatagaagctttgggttgagaaatttcaggtacattgagaccatcaaagaagctttggaaagggaatgcccaggagttgtttcctgtgctgatatcctcgttctctctgccagagatggcattgtttcgctaggaggtcccatatccctctta

SEQ ID NO: 83277 - DNA, 147 bp, Glycine max
  Clone ID: 700957058H1
gttcgatgctgatatggggtttcgaagaaaagtccatgccgttttgtgcagtcacatgtgcaatatgacatgccaaacatttactttgggatgaaatatagtattatatgtatgtttacctcatcaatgatgcaaaatgtgaattac

SEQ ID NO: 83278 - DNA, 262 bp, Glycine max
  Clone ID: 700957059H1
cctttctcctaccttcttcctctatcccctgacttaactttgctaccaaacaggcaacaaggctcaaggaactagtattgtttctatcatgggagtttgtttgagcacccaaattaaagctgggttaaattcaaagcatgttagtgccgatgcaaaagatcacagcagtccaattagcaataaaattacaaaagatgtcagcacaccaatcagtacagtctcagaggtatcagtgcctcagactcctcggattgagggtgag

SEQ ID NO: 83279 - DNA, 238 bp, Glycine max
  Clone ID: 700957061H1
gctgctgcatctctacatgagaaaaacaagtgggctagcttaaagtctgtaactatatcaactgcattcatcggtttgtctctcatgtctgtcattaactttgctacagcagagattggggctttacttattgtcccgatttgtctgatggctagaccattgaaacttgatattcaagctaggagctggagtaccttactaagggcctcttgcaatatggctatgaggtttattgtgt

SEQ ID NO: 83280 - DNA, 263 bp, Glycine max
  Clone ID: 700957062H1
atgatattggagagtcttgtgtctgagccgcataacagaagtttgctgctagcatatgagaatgcttttgcagagatagttttcactgatggaagatattccgatacatttgcgaggatattgtatgaactaacatctagaccaagtaacaaagtggcagcggctcgtggcatatggggtatgtaaacatcaaactgtgaaatgactttgattagtgatcagtgctatatatagttttgcgacttggatggcttttggacgac

SEQ ID NO: 83281 - DNA, 258 bp, Glycine max
  Clone ID: 700957064H1
caatgaaatactaattggaggctggaatgagctaaaaaacctggatgagtctggtaaacttgatgagaaggttgactttcttattactgaagcaccattatttgaagccccatcaccacctctctctggagaggatgatgtgtccagtagtggaccacttgatgaattggcaattattgtccgtaaaatgaaagaatctattgctgtgaaggatcggctgtataaaatgcgcaggttcactaactcttttctcagctc

SEQ ID NO: 83282 - DNA, 260 bp, Glycine max
  Clone ID: 700957065H1
cactggaagatggaattcgtgagattttttgattgctggaatgattttcaagaaaaggccacaacccaagtcttgattgttttggacaagcatgagaaccgcgatacttatgtggtagctttccgaggaacggaaccctttgatgcagatgcatggtgcactgaccttgacatctcatggtacgggattcccggcattggaaaaatgcatggtggcttcatgaaagccttagggctacagaaaaatgtggggtggcctaa

SEQ ID NO: 83283 - DNA, 265 bp, Glycine max
  Clone ID: 700957066H1
gttgagtggaaacgtgaaattagggttcatcgaggaggaagaagaagaagaagatgtcgtacctgttgcctcacttgcactctggatgggccgtcgatcaagcaatcctcgccgaagatgagcgtctcgtcgtcatccgtttcggccacgactgggacgaaacctgcatgcagatggacgaggtgttggcgtcagtggcggagacgataaagaactttgcggtgatatacctggtggacatcacggcagtgccggatttcaacac

SEQ ID NO: 83284 - DNA, 265 bp, Glycine max
  Clone ID: 700957067H1
tttttaaataatgtttttgtgtctctctccgtatatcatgaacacaataatagacaacccctgttaaattaaatcaactttaggacaaaacttgtcccttaaaaagagatagtaactccaactccaagtcacatcggtgacaaagttagaaacaaggagaaagaaagaagatggcaggaaagaaaatcccagatgtgttgctgaattcaggacacaaaatgccagttataggcatgggaacttcagtggagaatcgtccatcaaa

SEQ ID NO: 83285 - DNA, 258 bp, Glycine max
  Clone ID: 700957069H1
ctagcacataaaacttgctacgcgcagtaagctataactcatttgaggctctgggagaattgagaaatggcttgagatgttgaggttcaatagcaaggaggagagtactctgccaaagactaccatgaccctcctccagcacctttgttcgacccagaggagctcacacagtggtccttctatagagctctcatcgctgagttcatagcaagccttctcttcctttatgtcactgtgctcaccattattggctacaaa

SEQ ID NO: 83286 - DNA, 260 bp, Glycine max
  unsure (1)..(260): unsure at all n locations
  Clone ID: 700957071H1
gttcttgctctgggtgggtaaagatggtatgtngtagtagagtcttatgcttgtttctggcggcatttttgtggtttattgctcaacatgcttttgtaagttgtgctttgacatttgagttgcaaagcaaaattgctaaagccaaccaagagggaccttacctaggtttaatcataccaaattcttttgaactagaccctcttcttcagaatcctggctacacagctagtgacaccatcatagacttcgctggaaggaga

SEQ ID NO: 83287 - DNA, 130 bp, Glycine max
  Clone ID: 700957072H1
cggacagcaacacatgggagtttatggaaatgagtggtggtttagtagtttctgtgcaaattggcgccgtttaagacaccagaattcctgttctatgcctccttttgagtgaaaaagaagagacatcaaa

SEQ ID NO: 83288 - DNA, 255 bp, Glycine max
  Clone ID: 700957074H1
ctcgagccgttaaagcgcaaaaaccattctccttcggtgctcttgaaaacatgggaaaacagagcacagaattctctgccctcaactgcatcgacctctccaaccctgacatcaaccaatccgtcaatttactcaaacaggcatgtttggattccggttttttctacgttgtcaatcatggaataagccaggaattcatggaagaggtttttgcacagagcaagaaattcttctctcttcctcacaaggagaaga

SEQ ID NO: 83289 - DNA, 260 bp, Glycine max
  Clone ID: 700957075H1
ggcagactagtatccgatcctctgtcctctcgaagctttcatcgttcaacatattctcatcatctcagtcatgggcctgctatcttgttttaggtctaccgtcctgagaaaatgttccaaaggaagctctggcatgtcaagattcctgtatacgaacaattttcaacgaaacttgatttcgtctggtggcaatgaatcgtattatgggtattttaacaggagatcatacacttcactttatatgggaactggaactgtgg

SEQ ID NO: 83290 - DNA, 264 bp, Glycine max
  Clone ID: 700957080H1
ggaatatcaacatcactgacttctattacgcaatacagtgtacacccatttcaacttgcaaaatggtattgctctcgagccgaatcggctcgtgatttggttattatcttcatagctcaatgagaaagtcgacatgaaccaagagtagcactacattactactatccattgagccaatcaatctctctaccattgatgcaatacaacctccgattctgaatagaatatcccatgatcacgatttacaacagagattgagaggca

SEQ ID NO: 83291 - DNA, 264 bp, Glycine max
  Clone ID: 700957081H1
gtgtttctgtaaccatggcatccaccactctatcccctacaaccccttctcagctatgaccaggaaaaagtgggattttcagttcctcacaggcacttcttgtgaagccagtgaagaggcagatgatggggaagagcaagggattgagaattgcatgccaagccaccagcatttccgctgatagagtccctgacatgggcaaaagacagctcatgaatcttcttcttcttggtgccatttcactccccactgctggaatgctta

SEQ ID NO: 83292 - DNA, 260 bp, Glycine max
  Clone ID: 700957082H1
gtgatgcttttacattctatatagtgttgaagaagttaaatcacatattcttgagctaagatggacaaatcatccaactttgatgaaaattctgatgtggggtatcacccttcttcaccttccaatactcctgctttttccccaatgagtagagaaccttttgcatattgcccaacatggacaagctcagagtctgagactgtagacgagagcagctatgccagtgaaccttcaccttctcggtggagagttaaacagga

SEQ ID NO: 83293 - DNA, 258 bp, Glycine max
  Clone ID: 700957084H1
gttccagctacagcctctgagttgtttggtttgagaaactttggtgctttgtacaatttcattactatagcaaaccctgcaggaacactggttttctctagtctcattgccagcaccatctatgatgctgaagcagagaaacaacatcgccaaaatatgatgttgcgtgtgctgaatgctagtgagcctctaaagtgcgaaggttccgtatgtttcttcctaacttccatgatcatggcaggattatgcgtggttgga

SEQ ID NO: 83294 - DNA, 87 bp, Glycine max
  Clone ID: 700957085H1
tttctctctcatgttgcgaagaggaggcaccatgacaagcactgttctgtcttggcttgtcatgctctactcccttctcagtccatc

SEQ ID NO: 83295 - DNA, 124 bp, Glycine max
  Clone ID: 700957086H1
atacgatacaaattttgaatgacacaatgacttctgaattcccgatgcatttaccataaagaacttcatgcaagttcagttctatctcaaatctctaactctcgaacacattccaaaccaccca

SEQ ID NO: 83296 - DNA, 220 bp, Glycine max
  Clone ID: 700957087H1
gtaagggcattcttgctgctgatgagtcaacatggacaatttgcaagcgtttggtcagtatcgatgtagagtatgttttctccaataggcgtggtcttagggactatgcatttcacggatcgctgtgctcttaaatatcacagtggtggcatcctctctgttgatactctgtaccagtgtacagtggcaggtactctctacagttctgactatcctcatt

SEQ ID NO: 83297 - DNA, 191 bp, Glycine max
  Clone ID: 700957088H1
ttagagacccaaacccttggcgtcttcgagacccgttgtgttctctcttctctctctcttcttttgtgtttgcgctttccctctcttcttcgttccttttagggttttctcaactcttcgatttggggcttaaaccctcgccgattcagattgcggatttagggcttcccgttctctattccgcctccaaa

SEQ ID NO: 83298 - DNA, 256 bp, Glycine max
  Clone ID: 700957089H1
ggcaaggagagtgaggctagaaagaaagagtaaaagtaagagctagagagagagggtaccctctgcttaatttgcactgggtttgtgtctgttacagcacttttaggagttcttctattctagtaacctctgccaagcaacaagacaagtctgaaaatatgatagagatgctgcctccttgctggcgatcgttcgggaagaaacagtaatgctactggcatgggaaagaaggggatttttgtttctgcgatcaaaa

SEQ ID NO: 83299 - DNA, 53 bp, Glycine max
  Clone ID: 700957092H1
tgaagtatcatatcaaaattggaactctgcagtgtcctaaaacttgcatactc

SEQ ID NO: 83300 - DNA, 251 bp, Glycine max
  Clone ID: 700957093H1
tagaaatggagggtatcatgatttggagatgccggaccgcgaggtgaatgagtcggtgaatggaaactcaggtgagggaaacgatgcaatggaagtgggggaagagtttgatagagggataatgtctaaagagcaggtggtggatgtatcagatggggtgaactacagtgtggctggattgttgagtggaggtcagaagtgtggcggcaatgatgatataggcttggtgttggatccatctggttggggat

SEQ ID NO: 83301 - DNA, 261 bp, Glycine max
  Clone ID: 700957094H1
gcaaggtgatagattctcctccgttaccataccccttctcgatgatgaaaaattgcaccaagtgaatgggtcagattatgctttggtgtccaaaacttgtgttctgcacacagctcatgtgggtaatacctcctttttcatgacctgcttccatctcattaatgccttctcaggagttggtattatttccatgccttatgcactggcatctgggggatggttaagcatatccctactatttgtgattgccattgcttgttg

SEQ ID NO: 83302 - DNA, 261 bp, Glycine max
  Clone ID: 700957095H1
gctacaagcactccttggaagaagatgttgcagctcatacctctggccatctacgccagcttttagtggggttggtgacctcatataggtatgttggtgatgagatcaatccaaaattggcacaaactgaggctgaaattcttcatgatgctgtgaaagagaagaagggtagctatgaagagaccattagggtcttgaccacaaggagcaggacccaacttgttgcaactttcaaccgctacagagagatccatggcactt

SEQ ID NO: 83303 - DNA, 260 bp, Glycine max
  Clone ID: 700957101H1
atttcttacctcttggcatggccattcaaatgtcttcttttgtctttgtttctcttacaattttattttgcttctcttccttggagaagagttttgcctttcaaacaacaaaggagtccacagaaagcaacaatcttcatcaatatactcatcttgttcacctcagctcactccttccttcatcttcctgcagctcttctgccaaaggtctcaaaagaaaagcatcattagaagtggtacacaaacatgggccatgctcc

SEQ ID NO: 83304 - DNA, 253 bp, Glycine max
  Clone ID: 700957102H1
cctcttagtcccaattttctagggttttattcattttccgatggcttctgcagatgttgagtaccgttgctttgtcggtgggctcgcttgggccactgacgaccatgccctcgagagagccttctctcagtacggcgaaatcgttgaaacgaaggtctgtttgttgcaggcatcacatctgatctcacacgattcggattcggaattttctcgatcccgttctgatctgtgatctctgatctgtttgcgttac

SEQ ID NO: 83305 - DNA, 255 bp, Glycine max
  Clone ID: 700957103H1
ggcatcccggctgctcttttcaaagtctcgttaccataaagtgtgatatcccatgaaaccttcccaaccctccacaccttatattcatggcaccactctagtagagcaacattagaatcatatttgccagctccaactccaaatatcctagacatctggagcaaatggatcaataaattctgggatgaggattctgaatgttggctgctgtgattaatggccttttatcccctagcttggaaacggatgtgaata

SEQ ID NO: 83306 - DNA, 253 bp, Glycine max
  Clone ID: 700957104H1
cttatgatgttgatctcttgggccactgggattgctgaagccccaaagactgatcctgagttttggaagtctttgttccctgttgctgttgcacatacaattggacatgtagcggcaacagttagcatgtcaaccgttgcggtatcattcacacacattatcaagcgtggtgaacctgcttttagtgttctggtttcaagatttcttttgggtgagagctttcctgtgccagtctatctgtctttaattccaa

SEQ ID NO: 83307 - DNA, 252 bp, Glycine max
  Clone ID: 700957105H1
gctgttttgactatacaaatgctttagctgacttagtggttggatatatgggagtgccaaaatattctggaatcggcatgacacaacatccacaatatgtaacagtaaggaatgaacgtggaagagagatgttgagtcttatagagaacttactggagattactccaacaattagtactggggataggcgaccatttgtcatggagactgttaaggctgatgatgaagctaagttaggaagaggtccttctc

SEQ ID NO: 83308 - DNA, 252 bp, Glycine max
  Clone ID: 700957106H1
catcaaactcatcaaaatgaatctgtaccactcctccaccaccaccaccacccgcaccatcttcaccgtcatattcctcctccttgcaatattattcactctcacaccccacaaggccaacggtgccacgtgtcaccctgaggaagaagcgggcctgttgggcttcaaatccggtatccgatccgacccgtccggcctgctcagtaactggatatcgggtacggactgctgcacatggaccggagtagaatg

SEQ ID NO: 83309 - DNA, 248 bp, Glycine max
  Clone ID: 700957107H1
gattgctgaaactgcaaaacgggttggaacaattgtgattgctgatgaagtttatggccatcttgcatttgcgggcaagccttttgtgccaatgggagtttttggctctattgttcctgttctgactcttggctcattttctaagagatggatagttcctggatggaggcttggttggtttgtgacaaatgatccatctggcacttttagaaatccaaaggtagatgagcgcttcaaaaagtactttg

SEQ ID NO: 83310 - DNA, 120 bp, Glycine max
  Clone ID: 700957113H1
gagagcgaggaggtttagcgtggtgggcgagctagcccccctccccatcaattcaaactaaaatgtctatgctagcttcccccttccagctcctggaactgaacatcatatccgcccaag

SEQ ID NO: 83311 - DNA, 246 bp, Glycine max
  Clone ID: 700957115H1
gttctatgctgaccttgctgaaaaattggacgcacagcaaaaggctcatgtgtctcttcccatggacacattcaagagttatgttcttaaggagccgattggagtcgttgctttaataactccttggaattatctctctgttgatggctacgtggaaggttgctcctgctctggcggccggctgtgctgcaatattgaagccctctgagttggcatctgtgacatgtttggagctcgctgaaattt

SEQ ID NO: 83312 - DNA, 251 bp, Glycine max
  Clone ID: 700957119H1
aattaatcctttccagatttttgaggatgggttactattgctataaacgcaaggcttatagtactcatacatcagatgttattgtgatgttggcggtggccttgatgcttcttggcataccttggctctttacgcgtgaacaagtggtagtagttgaagaaaagaagacgaattggtcagctttgatcacaccaatactagtactactcatcctgcttttgctgtcgctttctggaactccaaggagggtc

SEQ ID NO: 83313 - DNA, 250 bp, Glycine max
  Clone ID: 700957121H1
gtgcttgcagtgagcttaaggataagttagaggattatcatgccttggaagaaaaattagaggaaaaagaggctgagatttcatcaatgcacaatgctttgttggcaaaagaagaaaactccctctttccagcatctcaaatgagtgatctctttgacaagatagataggatcaaaatccctattgtagagtccaaagaagatgatttggagccacatacttcagccactctgagaaaactcttttatat

SEQ ID NO: 83314 - DNA, 250 bp, Glycine max
  Clone ID: 700957122H1
cttttcttcaccagattgatagccagaaagagttttttgatactctgaaaattctactctttcaagtgaagcttcagaatactttccttccacatcagttagaagagcctctagagaactttttgatcttataaagtctgtttcctcaaagtcactgcatactagcttcaaggcctgaacaacttctcccatgaaaggacgttgggagacttctggttgcacacacatggatgcaattgctgcaactttt

SEQ ID NO: 83315 - DNA, 152 bp, Glycine max
  Clone ID: 700957123H1
caataataacccttctaagggcattggggcctcttcctcatcctttggtaattctggagtaccctccaattctataccttcaaaccctggattttcacagtccatggacaggcccagattcctgttggttatcaaggacagtttccactgtc

SEQ ID NO: 83316 - DNA, 250 bp, Glycine max
  Clone ID: 700957124H1
gtttgttgttgccccaggaaatcatagagagcgaggcataaacatcaatctctctgtgaaaaaaatggggacgacgaagaacaacaacaacaacttcaattctacctcaaaatctgataacagtgccaatgacaacaaaaacaacacacgtgtggtgttgaatgtctacgacctcacccctctcaacaattacctttattggtttgggtttggaatctttcactccggcattgaagtgcacggtaaggag

SEQ ID NO: 83317 - DNA, 247 bp, Glycine max
  Clone ID: 700957125H1
cttaatgacactggaattcagtttataaacgtaatcagcatgtataggcagctacaatattttaaagagtaccaaaaccgagtgagagctataattggagcttcacagactaagagcttagtgaatcaagcactagtactcatcactgtaggtggcaatgattttgtaaacaactacttcttggtgcccaattcagcaaggtctcgccaatacccattacctcaatatgtcaagtatctcatttctg

SEQ ID NO: 83318 - DNA, 246 bp, Glycine max
  Clone ID: 700957127H1
aattaatcctttccagatttttgaggatgggttactattgctataaacgcaaggcttatagtactcatacatcagatgttattgtgatgttggcggtggccttgatcgcttcttggcataccttggctctttacgcgtgaacaagtggtagtagttgaagaaaagaagacgaattggtcagctttgatcacaccaatactagtactactcatcctgcttttgctgtcgcttattggaactccaagg

SEQ ID NO: 83319 - DNA, 245 bp, Glycine max
  Clone ID: 700957131H1
tttaaatcaagggttgattgaggaatatgattcaccaaagaaactgcttaagaacaagtcttcatctctagctcaactagttgaagaatacacaaggaggtcaaattctggttttggaaattaaattgaaaatgaattagtattaacctcgaaccagacatgtctatatatatatatatatatatggtcaccgttacacttcatgtagtgttctaccttactggactatggtagagattttactc

SEQ ID NO: 83320 - DNA, 254 bp, Glycine max
  Clone ID: 700957133H1
cgccgttccgccccttgaaatctctatcaacgattctagccagctcacgctctcgtttcgcggccaagtctatgtcttcgacgctgttacacctgataaggttcaagcagtgttgttgctgttgggaggaaatgaactaacttcgggttcgcaatgtgcggagctatcatctcaaaatcagactggtgaggaggaatatcctgcaaaatgtagtctaccacagcgagcagcgtcattgaataggtttcgtcaga

SEQ ID NO: 83321 - DNA, 248 bp, Glycine max
  Clone ID: 700957134H1
tggtgatggatttggtgagatggagagcgggcgactacacaaggaagatttagaagtggatggagattcaaaaggagagaaggatctacaagttggggtcactccctccctttttgctggctttcggtggtaatgttgaggccattgaacatagatggaaccaacatggtcttggaggggataatgtaagaaatagttgtaggactctgcatcctggtccagttagtttgctacattggagtggtaaa

SEQ ID NO: 83322 - DNA, 246 bp, Glycine max
  Clone ID: 700957138H1
aactaactcactcgcgccatggctgctaccatcatcaccacatgcaagctctcattgcttttgagtcttctctcagtttcacgtttgctgggtgtgaggtctgataccctacagaatgtcggcgcaattccccccacatgcaagcgcatatagtgtcccagctatgatgtcattcacgtaggcaacggctacgaaatccgtcgctataattcacccgtttggatttcaaacagccccattcaggac

SEQ ID NO: 83323 - DNA, 248 bp, Glycine max
  Clone ID: 700957139H1
gatcaatatggccaccaccactacccagcctccctctaatatctgttttttccttctgttgttgcttctagcacactttcatttgggcataagccaacttgagctgaattactactctaaaagctgcccaaaagctgaagagatcatcaaggaacaagtcacacaactatataacaagcatggaaacactgccgtttcgtgggtcagaaatctcttccacgattgcgtggttaagtcatgcgatgcat

SEQ ID NO: 83324 - DNA, 248 bp, Glycine max
  Clone ID: 700957140H1
ttcttttcatctttgctcttctatccttcacttcccatgcttctaatgtcaatgacttctgtgtggcagacctgaagggtccagatagccctactggctatcactgcaagccacctaaaacagtaacatcacatgactttgtgttccatttaggccctggaaccacttcaaacgtgttcaagtccgcaataacctctgcatttgtcaaagattttcctgctgtcaacggtcttagcctttctgtagca

SEQ ID NO: 83325 - DNA, 124 bp, Glycine max
  Clone ID: 700957142H1
gaagctgggatctttgctctccatgcatggatgttacgaacatcttaaaaaagctagtggtgataaggttgggaatgtagatggagatgcagaacaaggaatttatgaagcttctacaccccca

SEQ ID NO: 83326 - DNA, 243 bp, Glycine max
  Clone ID: 700957145H1
cacccttacaacgcaacaacataacgttgctaattgctttgcactcctcttatggttgcttcctttgtttctcattagctgttttggtttttgtcttagttctacacctttcctcatttccgcagtagcaacctgctaaccaatctctctgagaaaaaaaaaatggcgtcgaacgggaatggcagcgttgcgaacgggaacgggaccgctaggaacggactggcgaagattcagacgcacaag

SEQ ID NO: 83327 - DNA, 123 bp, Glycine max
  Clone ID: 700957147H1
gatttggctctcctccggttagggggatggaggataaaaaaccactgctctctttgttttcacttttgagatttttccaacctgaagactccctcttcttggttggttttttctccaaacaaa

SEQ ID NO: 83328 - DNA, 254 bp, Glycine max
  unsure (1)..(254): unsure at all n locations
  Clone ID: 700957148H1
attcggctagagcgatgatgatggagtgccaggctctcctttgcatgagaatcatgagactgacactttnatgacaaatgatgatgttttggtcgatgagattcctaatgatcagcaagatgcatttcgtcagttctgctttcaaacactcaaactaggtgttggggccagagggcacatgcaattcccagggtcacatccagtttctttaaacagggagaatttacaactgttacgacagcgttattattatg

SEQ ID NO: 83329 - DNA, 250 bp, Glycine max
  Clone ID: 700957149H1
attggtttctctctctagcttggacgagtgaattagattcatcatcaagatgtcgtctctgatagcagaagatgtgaagagcagatcagaggtgtaccacggggacgaaatgtgccaagtgaagtccaaggagcttctcaaggaaatcgccctccccaacggccttcttcccctcaaggacatggaggagtgcggctacgacagacaaaccggcttcgtctggctcaaacaaaagaagagttacacccac

SEQ ID NO: 83330 - DNA, 250 bp, Glycine max
  Clone ID: 700957150H1
ctccactgttactaaatacaggcgtcacctttgaggataaacctcaccagttccctggttgaaacgaagcgaaatttccacctgcatcatcttcaaacctgcgcttcttttgaaccgatttgtgctgttttgttagtgaagcacatcgagtgcaaactgtcgaacaggcatggcaagcctgttgacaacatcagccatcacctattctcctctgcacaatggcttcaaggatttcagaaagtcagggaat

SEQ ID NO: 83331 - DNA, 246 bp, Glycine max
  Clone ID: 700957151H1
caaaaagattcaatttcaaggtttgtagtggaagttatgatgatggttatgtgattggtgaagaggaagcaagggatatttcagggttagaggaccctgtaacaaccaaggttctgattccaggtctgcttgatgattcaaaaggtgaatctggtgctccaataagtagttgtttttggggatggaaacctaaactcaatgtgcactatgagaaggccgggtgcgataacgtcaatgatttgcctc

SEQ ID NO: 83332 - DNA, 245 bp, Glycine max
  Clone ID: 700957153H1
aactgttcttctcagttgtgccttcctatacgacatcttctgggtgtttgtctctaaatggtggttccatgagagtgtgatgatagtggtagctcgaggtgataggagtggagaagatggtatccctatgctactcaagataccacgtatgtttgatccttggggtggttacagcatcattggttttggggacatcatcttaccagggcttctagtagcattttcactaaggtatgattggttgg

SEQ ID NO: 83333 - DNA, 245 bp, Glycine max
  Clone ID: 700957155H1
gcttgttgaagaatgggcagttcccttgaaaagcattgaagatatatatgagaggtttagactgtattgtcttggaaagttgagaagcaatccttggtcagaactagatggtcttcagccagagacaaagataataaatgagctgctggaaaagattcacacaaagggcttcctcaccatcaatagccagccagctgtcaatggggaaaagtcagattctcctactgttggctggggtggaccag

SEQ ID NO: 83334 - DNA, 244 bp, Glycine max
  Clone ID: 700957156H1
atgggaatggattttagggatgcctgctggtccttacttatatgcggatgatctgattgaagtcttgaagaaaaaacatgcttctggaacgtataaaaacctagtattttatctggaggcatgtgaatctgggagtatctttgaaggtcttcttcccgaagatatcaatatttatgcaaccacagcttccaatgcagaagaaagtagttggggaacatattgccctggggagtatcctagtcct

SEQ ID NO: 83335 - DNA, 240 bp, Glycine max
  Clone ID: 700957161H1
ttaaaagttaaaaaggccaaggtcctggctctcacagagacagagagaatgagtacggtgggagaagggaaggtgagtagtaatggtcgtggatgttgcaaatcagggccaggctatgcttccccactggaagccatttctggtcccagagagtctctcatttatgtaacctctgtctacacagggaccggaatagagaagccagactatttggcgacagtggatgtggatccacactct

SEQ ID NO: 83336 - DNA, 84 bp, Glycine max
  Clone ID: 700957163H1
ggattttgctgcagtttaactctcatggctcatctgtttcttctcaatctggtattggcattggggtccagtccacaagtcttg

SEQ ID NO: 83337 - DNA, 247 bp, Glycine max
  Clone ID: 700957167H1
cgcagagagagagagatccatcgatcaattaatttccaatggccgatcagctcaccgacgaacagatctctgagttcaaggaagcctttagcctcttcgacaaggacggcgatggttgtattaccaccaaggaacttgggactgtgatgcggtcgcttgggcagaacccaactgaggctgagctgcaggacatgataaatgaggttgatgctgatgggaatggttccattgatttcccagaattcct

SEQ ID NO: 83338 - DNA, 81 bp, Glycine max
  Clone ID: 700957170H1
ggctcgagcttgctatttgtatcatcttgtgtaccttcttaagctttgagcaattcccttttacttttatttcactccatg

SEQ ID NO: 83339 - DNA, 244 bp, Glycine max
  Clone ID: 700957171H1
ctagcacgcaacctgtttgttcgtaaattcggccactccaaagtatatgcaccacaaacaacaacaccctcttaatcttctccacacaacacacaactctcaaaaattacataaattcctagcccaaaaacttgatcagtaaacaaacatgggaaactccgtgcgtgtaaaagaagcatctgtggttacacttactgagcccactccatcgagtgtgttggctctatcagctcttgattcgcaa

SEQ ID NO: 83340 - DNA, 241 bp, Glycine max
  Clone ID: 700957172H1
ctttctccgatggctaatccctcactcttgttcttcagtctccacctattatccgccaccgtagccgccgccgaacggatcgacgatgaagacgaccttctgatccgtcaagtggtgccggatgcggaggaccaccacctgctcaacgcggagcaccacttctccgccttcaagacaaagttcggcaagacctacgccacgcaggaggagcacgaccaccgcttccgtatcttcaagaaca

SEQ ID NO: 83341 - DNA, 242 bp, Glycine max
  Clone ID: 700957173H1
caattcttccccctccacccacccagcatatttctctattcctatttattagcacccctcacattaccttgtgtcaccaactactttgactcctttaccataccattacaataattatcaaacctaaccagtaaaaatggtgaccgtggaggaaatccgcaacgctcagcgttcccatggacccgccaccatcttggccttcggcaccgccacgccgtccaactgcgtctcccaagccgatt

SEQ ID NO: 83342 - DNA, 239 bp, Glycine max
  Clone ID: 700957174H1
cccctccaagcaatgcaggcgggtaccctccgagcaatgcaggctatgcccctccgagcaatgcaggctatgcccctgcaaatacagctggatattcttctccgaacgccgcaggaggttaccctcctaatgcaggtggtggctatggtcctggtggtggtgtgcctcagaataactacgcagggaacatgggagggccaccatcaaaccagaacatgggagggtttcaacaaaattca

SEQ ID NO: 83343 - DNA, 246 bp, Glycine max
  Clone ID: 700957181H1
acggtggattacctccagaagccaactacttgtttttgtggggattatgtggatcgagggaagcaaagtttagaaacaatttgccttctccttgcttataaaataaaatatcctgagaactttttcctgttaaggggaaaccatgaatgtgcttctataaaccggatatatggattttatgatgagtgcaagagaaggttcaatgtaaggttatggaagacatttacagactgcttcaattgcctg

SEQ ID NO: 83344 - DNA, 117 bp, Glycine max
  Clone ID: 700957183H1
gattgacagagagagagaggaaggagcgcgaaaagactaaattgaccttggatcttcgtctttcctctctctccgattcgtttttcgttggtcttctaaaagcttcttccacacaac

SEQ ID NO: 83345 - DNA, 244 bp, Glycine max
  Clone ID: 700957184H1
tcgacacagaagaagcatatccctacaccggaaaagatggtgtctgcaaatttacagctaaaaacgttgctgttcgagtcattgactctatcaatatcactttgggtgctgaggatgaattgaaacaagcggttgcttttgttcggccagttagtgtggcatttgaggtagcgaaggacttccgattctacaataatggagtttacactagtaccatttgtggtagcacgcccatggatgtaaa

SEQ ID NO: 83346 - DNA, 223 bp, Glycine max
  Clone ID: 700957186H1
gcagcattgggagatagaaagagagagagaaagagagagagagaaagacccttacccttctctatcgctcgctttcctttgacgcttctgacccttgctttgtctgcgtcttccttctttctttctttctttctctgtgtgtcgtaatggctctcccagactcttcttcccgtcgcaactccctgatcccctccttcatctactcctcttcctccaaaacgct

SEQ ID NO: 83347 - DNA, 241 bp, Glycine max
  Clone ID: 700957187H1
caccaggcgcacgttagcacaaactatcatggccacggcaacagcagctgccacctcgtcctttatggggacgcgtctcctggaggctcactccggagcggggcgagtgcacgcccgattcggcttcggcaagaaaaaggctcccgccccaaagaaagcctccaggggatcgggccgagacaccgacagacccctttggtatccgggcgccaaagcgcccgaatacctcgatgggagtctt

SEQ ID NO: 83348 - DNA, 241 bp, Glycine max
  Clone ID: 700957188H1
gttttctctctagattctgctcttaaacgccgtcgttttcaaactctttttttccccttcgcttctctgtctttgtaaccgaaaggggggaaaatataattaacaccgatttcgcgaccaattcttcttctgcgttgaattgggacaacgagaaattggatctcagtttttggcaggaaataaaaattgcatttgagtgtaaaataacagagtatagtgtagggccttgttcttgatactg

SEQ ID NO: 83349 - DNA, 236 bp, Glycine max
  Clone ID: 700957190H1
gttcagttcacatgtggcaatattcactaccttgagtcaatcctataaccaaatatgcattgatgcttactccagtcataaatgctgtaaaaaacaaagtttcatggcattacaacaaaaggttcacacatatgtttgtcagtacttccatgctcattagcactcttattgtagccgtggcaattcccttgtttggatatctcatgtcactcattggggcattactaagtgtctca

SEQ ID NO: 83350 - DNA, 238 bp, Glycine max
  Clone ID: 700957191H1
gtgttgtgtccctcttttaagctatttccttctcttaacacaattggttgtgccaattgctctagtcaccaaccaattaacaaaggtatatatatcatcatatcatcaccaaatgaaaaatattgggttgttttttcttgtggtggtggctacttttgtggtggcagccacagctggtagcttttaccaagactttgaaataacgtggggtggtgagcgtgccaaaatctatgagaat

SEQ ID NO: 83351 - DNA, 238 bp, Glycine max
  Clone ID: 700957192H1
cacccattgatgacaagcaaccccattgcatggaagcctaagaggaggagaagacgaagaggacaagggtaactgaatcgccgcttctgcagcttcgttctttcgtttttgtttcatctttttagcttcagtgggtaaataaaaaatggaggttttggtgggtcccgctttcaccatcgacgttccctcgtctccgccgcagcatgccggttccgatgatcggatctttcttaacgtg

SEQ ID NO: 83352 - DNA, 237 bp, Glycine max
  Clone ID: 700957194H1
agtaaaggaggtacataaaattactgttttggacataagactggcaaatgcagataggcatgctgggaatattttgatcagcaaagaggaggacaacaaccagtctgttctgattccaattgatcatggatactgcttgcccacaagttgtgaagattgcacctttgaatggctttactggcctcaagctcgccagccatactcctcaggaactattgactacataaagtcactgga

SEQ ID NO: 83353 - DNA, 236 bp, Glycine max
  Clone ID: 700957196H1
ctttcttcttcttcttctcttcttcttcaagattgcgacgacgatccaagtgatagacactcgttgcgatggaacttgtagctgaatccgagcgaactctgtacccatacgtgactggatcctctgtagtcgctatcaaatacaaagatgggattctaatggccgctgacatgggaggttcgtatggatctaccctgcggtataagagtgttgagcgtatcaagcctattggaaag

SEQ ID NO: 83354 - DNA, 249 bp, Glycine max
  Clone ID: 700957201H1
ggcttatggtggatacctaggcacccagagacgaggaagggcgtagtaagcgacgaaatgcttcggggagttgaaaataagcgtagatccggggattcccgatataggtcaacctttcgaactgctgtgaatccacgggcaggcaagagacaacctggtgaactgaaacatcttagtagccagaggaaaagaaagcaaaagcgattcccgtagtagcggcgagcgaaatgggagcagcctaaaccgtga

SEQ ID NO: 83355 - DNA, 246 bp, Glycine max
  Clone ID: 700957202H1
caccagcagtggcgcttcgcgtacaaggtgaccgttcggccttcttcgactgtgccatacatggttaccaggacacactatacgcccacgctcaccgtcagttctaccgtaactgcgaaatctccggacagtggacttcattttcggctacgggacaaccttgatccaaagctccaaactcatagtgaggaagcctgacccgtatcaacagaacatagtggtggccgatggcacggaccagaagaa

SEQ ID NO: 83356 - DNA, 249 bp, Glycine max
  Clone ID: 700957203H1
gacaaatgcaaggtgttggtcaacattgagcaacagagcccggatatcgcccagggtgtgcacggccacttcaccaagcgcccagaggaggttggtgctggtgaccagggtcacatgtccaggtatgcaccgatgacacccccgagtacatgcccctcagccatgtccttgcaaccaaacttggtgctcgcctcacagaggttagggagaattggcacctgtgcttggttgaggcaagatggtaagaca

SEQ ID NO: 83357 - DNA, 247 bp, Glycine max
  Clone ID: 700957205H1
ctctgaataggaaaggaagcaatactctcgttacacatcatccttttcttcttctttcactgcttcgatgctctgatatctctctctcattcagggtagtgagctggttgttcatggctctttcctgaaacatccacacctgttcaaccatattaggacttttgtgaatgtgaaggtgaaatgggtccaagacccatatcttgataatgcagtcctgaaagagaaagatctcaaacagacaatttcc

SEQ ID NO: 83358 - DNA, 249 bp, Glycine max
  Clone ID: 700957206H1
atcaccattgtgtcttcttcactccaccttcttcattcccacccaattgtctccccattaaacaataacatgaataatattaggaatggatacagagaagcaaaatcattctgctatttccaccccaacaggtacttgttggggtgtgtcccctgtgcttgaatgagaggctcctcatactgtttgcaaaacaaggtcgccaccacaaccgttcttcttcttcatccatatcttcacacaggcttcaaa

SEQ ID NO: 83359 - DNA, 249 bp, Glycine max
  Clone ID: 700957207H1
gtgatcagggaaatgacgtggagtcaactaatatactggaattcattgaccaatgtacaaacacaatgcagctaaagcaaatacatgctcacatgctccgcacatcccgcttttgtgatccatatactccagcaaattgctgactgcttatgctatctcatcatgctcttgcctcatatatgctaaaaatgtgtttaatcaaatcccgcaaccaaatctctattgttggaacacccttattcgtggata

SEQ ID NO: 83360 - DNA, 249 bp, Glycine max
  Clone ID: 700957208H1
ctctacttcaatgtttatgttaatgggaaagtggcaatcaataacttggatttatcagccatcactggtgccttgtcaacaccatactacaaagacattgtggtgaatgcaacattgatgtctgagggctaacggttcaggttggtccagcaaatgctgatggtggaaatgccaatgcaattatgaatggcatagaggtcttgaagatgagcaactctgtcaacagtttggatggggaatttggtgttg

SEQ ID NO: 83361 - DNA, 250 bp, Glycine max
  Clone ID: 700957210H1
ctccgaaagaggatgactatgattatctcaaggaaggaaggaagcagagtgaagtaaagttcaaaaaggccctttcacgggtgaagtccatggttcagtatccagaggcacgggctcaataccggcggggctaaatgtagttgaggacttccgtcaaaccaagggaggtaatttgaatttgataaattcggaagagacagttgatggtgtggaggatttgattgatattgacatgcttttagatgatgaa

SEQ ID NO: 83362 - DNA, 248 bp, Glycine max
  Clone ID: 700957211H1
ctgagaatgagaagagaaagcggaaagaaagtagtgatgttagaagcaaaaagaagaatcagcagagaagcgaagatgaagaggcgacgaagcagttgcgtttctttgagtcggcgatgggtattgagcttcttcgctggagttggaatcccacaaagataataagtgcattttggaggtatcagaagccgctgattcagacgtgacagtattgggcaaaactattagggcagcgtttggcgctcttg

SEQ ID NO: 83363 - DNA, 249 bp, Glycine max
  Clone ID: 700957215H1
gccttctgttgcctctgctgtcggttttgttggccctggagccgctgtggtgttacctgttgttgaggccgatttgagaaaaacagctgccaaaatcactgaacgtgctacagaactatgcaagaagaatccgtaaatgacgtagcagtggaagtgctagaaggtgatcctagaaatgttctttgcgaggcagtggaaaagcaccaagcttcaatgttggttgtgggtagtcatggttatgggacttta

SEQ ID NO: 83364 - DNA, 247 bp, Glycine max
  Clone ID: 700957217H1
gcaggttcctaagtttcttagaaggtggataactccacgcgaacctccagatagtcatgtggttctggcattgggagccttacatcgaatagattttgcttcacttcgcagtgctgccattacatggaagatgtgtttgcaaatgttccaaggccattgctcgtggtcaacattggaggaccatcaagaaactgtcggtatggtgtcgaccttgcaaagcagttagcaacatgtttgctcagtgttc

SEQ ID NO: 83365 - DNA, 227 bp, Glycine max
  Clone ID: 700957218H1
ggtgaatgatttcgttatcagcacagattggtgattggtaatgtataactaggatgcaatggaggacttatggactatgcgtttgagttcattatcaacaatggcggcattgattctaagaggattacccttaccgtggtgttgatggtagatgtgacacatataggaaaaatgctaaggttgtttctattgatgactacgaagatgttcctgcctatgatgagtta

SEQ ID NO: 83366 - DNA, 246 bp, Glycine max
  Clone ID: 700957220H1
taatcagagacttaatggcaacaattatggattcataaatttggagaaataaggtaatagaaggctagctatatgcttaacacagctagttcgaaaacgagccatcgaagtatctaactgcgcatttagctaatctgtctgagccatctcttttgaaggtatgacacctgctaggttgaccgcgccccgagggagactatggtaaggtcggatagatcgagtcttttgatactcttattcttagga

SEQ ID NO: 83367 - DNA, 249 bp, Glycine max
  Clone ID: 700957222H1
gccaagtgaaagagagaagaaaagtcaaagacaatgtcagggatcattcacaagattgaggagacccttcatgtgggaggccacaagaaggaggaggagcacaagggtgagcagcaccatggtggagatacaaaggggagcatcatggtgaacacagtactgaacccaaaggagagcatcatgttggtgagcacaagccggagcaccatggaggagaagagcacaaagaggggttcctagacaagatca

SEQ ID NO: 83368 - DNA, 247 bp, Glycine max
  Clone ID: 700957223H1
ctttttctctatcttttgttctgctcagctcgatctacctaccttggttcttctctgttctgttatttcagtgcagcagcagaaaatgaccatcctcattgagcaacctgcccttgagttacaagttaaggcaacaatgtgcatgctgaagaaaccaatgagcttgtattggatggtggatttccattgccaaaggatggatatatggccccagaaatcaattcatttggccactccttcagagaat

SEQ ID NO: 83369 - DNA, 251 bp, Glycine max
  Clone ID: 700957224H1
gacgaaggtggctttgcccctaacatccaggaaaacaaggaaggcttggaattgctgaaatctgccatcgccaaagctggttacacaggcaaagttgtcattggaatggatgttgcagcttctgaatttacaaggaagacaaaacatacgatttgaacttcaaggaagataacaatgatggctcccagaggatctctggagatgctttgaaagatctgtacaagtcatttgtgtcagagtacccaattgtt

SEQ ID NO: 83370 - DNA, 249 bp, Glycine max
  Clone ID: 700957225H1
gcacaaactaccacattcaatgtgttagacaaagtctagaaacaaagactaacaaagtcatgcttggtgaccattgtccaacaacccgtaaccaaagttagaatctttgtgacaaaagctcacatggggcctctctttcagcatagtagtacttttggaagatttttgctccaaaattggaaatgagtttctctcatctcctccttcatctatgtttgttggttgcatttaatccacagctactagttc

SEQ ID NO: 83371 - DNA, 248 bp, Glycine max
  Clone ID: 700957226H1
cttttacaatggagatatggaatagttggtgggttttgcaaattatgcaatttctgggtttttttagtttttggatttcatttgcaaagtttaggactttattctcaagagcttttggttatggccaaaggttgtgaagggtgactgcagtacttggatctttgtttccttcaatgggttggtcacagttgtctctttcatattcttcctcttggtcctttcctgggcttatttatacgcatttccca

SEQ ID NO: 83372 - DNA, 247 bp, Glycine max
  Clone ID: 700957227H1
aattaatcctttccagatttttgaggctgggttactattgctataaacgcaaggcttatagtactcatacatcagatgttattgtgatgttggcggtgcccttgatgcttcttggcataccttggcctttacgcgtgaacaagtggtagtagttgaagaaaagaagacgaattggtcagctttgatcacaccaatactagtactactcatcctgcttttgctgtcgcttattggaactccaaggagg

SEQ ID NO: 83373 - DNA, 250 bp, Glycine max
  Clone ID: 700957231H1
ttctctctctgtctttcgcactttcattctctcttaaaaatctaaatcccttttgggcttcatctgggggtctgacccaggtatggcttcgaaacgcatcctgaaggtgctcaaggatttgcagaagatcctcctacgtcatgcagcgcaggtcctgtggctgaagacatgtttcactggcaagccacaatcatgggacctgctgatagcccatatgcaggtggtgttttcttagtttcaattcattttc

SEQ ID NO: 83374 - DNA, 244 bp, Glycine max
  Clone ID: 700957233H1
cagattgttcatattagatcaccatgatgcattcatcgcatatctgaggaagatcaatgaccttcccactgcaaagtcttatgccacaaggaccatccttttcttgaacgatgatggcaccttaagccattggccatcgaattaagtttgccacatcctaggggagatgagtttggtgccgtttctagagtcgtcttgcccgcagaccaaggtgctgaaagtacaatttggctaattgccaagg

SEQ ID NO: 83375 - DNA, 248 bp, Glycine max
  Clone ID: 700957240H1
caaaataaaaagacttccttttttgcaattgtcatttgtcaccaaacaattgttgttagctctcacaagcaagcttcagcaacgacaatgaagaaagtagtcttacagttggacttacatggtgataaatcaagcaaaaagctatgaaaacagcatctggcctttcaggggttgaatcagtttctgttgatatgaaagacatgaaaatgatcgtgttgggggacattgatccagtgagtgcagtgtcg

SEQ ID NO: 83376 - DNA, 247 bp, Glycine max
  Clone ID: 700957242H1
ggcgagagtgtggcttgggacattcgacactgccgaggctgcggccagagcctacgatgaagccgcattgaggttcagaggtaacagagcaaaacttaatttccccgaaaacgttgtaccggttcacctcctcctccggttcccgatttaccggcaagtgcggtagccggttccgattccatttccggttccggttcagtggtggcaggtttttcgccgacgctgatgcagggagcgccgtttcagg

SEQ ID NO: 83377 - DNA, 247 bp, Glycine max
  Clone ID: 700957246H1
caaggtcggtgaaagcgagactcaaaccaaaaagtttattgctattaatatatggctttgttttccagtgtcaaattgcattattacaataatcaaatgcactaaccacactccatcacccccattataccccttctcctctcacactaattaacactctcatcaaaaaacccttctttctttcaggttcattacttgatcagtgtcaaaagggtagttgcaaattgcaatggctaagcctgatgtt

SEQ ID NO: 83378 - DNA, 243 bp, Glycine max
  Clone ID: 700957247H1
gcgaagaatatgtattctagagattcatggggtggaccgttggagataaacgcgacggactcggcgacggaggacgagcggagcggaacctgcaggacgtcgacagggcagcgctgtcgcgtccttggatgagacgcagcagagctggctccttggccccggcgagcagaagaagaagaagtacgtcgatctcggctgcatcatcgtcagccgcaagatcttcaagtggaccctcggcacaat

SEQ ID NO: 83379 - DNA, 247 bp, Glycine max
  Clone ID: 700957255H1
caaaaaccagacatgtccgagtcggaagtagcaggtcagaggtaccgtgtgggctatgctctccaaggcaagaaagtcgaaagcttcattcaaccctcactcctcgatcacgccaaacaacacagatctatctcgtccaaatcgaccccaccgcacccttacaacaacaaggtgctttccactgcatcattcacttactccacacccaacactgctccaactagctccaacaattctcatccaaaca

SEQ ID NO: 83380 - DNA, 246 bp, Glycine max
  Clone ID: 700957256H1
cccagagatggtaccatgtacctcgatcttggttgaagccagatcataacctgttagttgtttttgaggaacttgggggagatccttcaaaaatttcacttgtaaagagatcagtgagcagtgtcttgctgatgtgtctgagtaccacccaaacattaggaattggcacattgatagctacggaaaatcagaagagttccatcctccaaaagttcacttgcattgtagtcctggccagaccatttc

SEQ ID NO: 83381 - DNA, 246 bp, Glycine max
  Clone ID: 700957257H1
aagcccctcaggcttccccttcaggatgtgtacaagattggaggtattggaactgtgccagtgggacgtgttgagaccggtgtcttgaagcctggaatggtggtgacttttgcaccaactggacgacaactgaagtcaagtctgtggagatgcaccatgaatctcttacagaggcacatcctggtgacaatgtgggattcaatgttaagaatgttgctgttaaggatttgaagcgtggttatgttg

SEQ ID NO: 83382 - DNA, 245 bp, Glycine max
  Clone ID: 700957261H1
tccagcacaggttgagatcctaaatgtgaacagagacacaatctacagcgtagttggagagagggaccctgcgaacgtgaattcatgggtgtctaggaggggcaatttccatcctgtagtgaatcagttggagcagcagcttcgatggcgtgtgcaactgggaaaaggatagtggcagtggagttcgcaagctttggaaaccccagtggttattgcggagactttgcaatgggaagctgcaatgc

SEQ ID NO: 83383 - DNA, 242 bp, Glycine max
  Clone ID: 700957262H1
taactagaaacagtgtgatgaaaatgaaggtccttactttcttcgttgctacaattttgctagcatggcaatgccatgcgtacgatatgttccctctccgaatgaacactggctatggtgcccgactccggaggtgaaatgcgcaagttggaggcttgctgtggaagcacacaacatctttggctttgagaccattcctgaagagtgcgttgaagctccaaaggaatacatccatggcgaac

SEQ ID NO: 83384 - DNA, 244 bp, Glycine max
  Clone ID: 700957263H1
caaaagagagaaaacgggatggatactcatcataggtcatagttggtggctaattgataagaagcctacatgtgcttctatatgttatgttgagatatggcttgccatttccgtaatttgatcggtaatcatggtcatttctttagcatagagttgataaatatcatcaagacagaactagtttagtgttttacgagtaagttaagataagatgaagaagatggtggttgcaatgatgcttata

SEQ ID NO: 83385 - DNA, 247 bp, Glycine max
  Clone ID: 700957264H1
aaaacggttggtggcttccaatcatctggcaatggccaaatttgatctaacgcatgtacagcggcccttgctatcatttggtccaaaaacttccatgaagctcagtacttgccccgttaatgtttcaaggaaattcggttgagttctcatcttattagtgattttagctatgagagttctgcaatgacaattgatggtgcctttagtacagcttggcttaggaatttacaaaagccgacgggttctc

SEQ ID NO: 83386 - DNA, 102 bp, Glycine max
  Clone ID: 700957265H1
cgcagcgctgatagccgtcagcacaggtctatggtatacacatgaaattcacgccttcctccaaattcttaggcctttcaaatcacttccactcccttctcg

SEQ ID NO: 83387 - DNA, 83 bp, Glycine max
  Clone ID: 700957270H1
attaggttctgcgtgcacaggcgacaaccctaatcctgaggcactcaaagtgtgagtatggcaagagtcatttcctcttcctg

SEQ ID NO: 83388 - DNA, 245 bp, Glycine max
  Clone ID: 700957271H1
cgctcatccactaactgctactcgctcatcccgtggaggtttcgctctctcagtttcttttccccaaattggtttttcatctaacaatttactttgcagaaccgtaaccctaaccccttccccaccttgtaaccttcctttcgatccttcacctcgcagataatgggagaaacaatgacgaagcatacgaggaagagcttctcgattacgaggaggaagacgaaaaggcccccgactccgccgga

SEQ ID NO: 83389 - DNA, 81 bp, Glycine max
  Clone ID: 700957272H1
acctaatgaaggaggtttcctttccatcagtttcagttccaccaaaattcaaaaatcactcggcatggggtgcgtgtcttc

SEQ ID NO: 83390 - DNA, 242 bp, Glycine max
  Clone ID: 700957273H1
caggagccaaaaccgatcactgggaaagcgaaaattgttaccacgaagattctgttgtcgaaggaggagacggaggaggaggaggatggtttgcaaagcctgttggctgagtgggtggagctttgcaacctagcagggtggaatggatggatttgctcgacaaattaaaagagcataatcctggtttgtactttaaggtggctgaaatggtattgactgaagattctttccaaacacatgta

SEQ ID NO: 83391 - DNA, 239 bp, Glycine max
  Clone ID: 700957274H1
ccgagtcgaaccatcatgctcgcaaactctgctccttatatcaatggccagcagaggtacgccgtcaacggtgtctcatacaatgcaccagataccccattgaaacttgctgactacttcaactcccgggagttttctacgttggaagcattcctacctatcctaacgggggcaataatgcctatctcccaacttctgtcatgggggctaatttccatgaattcgtggagattgtgttc

SEQ ID NO: 83392 - DNA, 246 bp, Glycine max
  Clone ID: 700957279H1
gatagcctcaactcaagtaagggttttctctttgagaaaatcgtatcttacaccttttggtgagcacttggcgtgagagaagagaaattaagagagatactcaaattagattcaagagagatgccatcaaccatgaaacttgggctttcattttcggtcttctaggcaacgtgatctcctttatggtgttcctacgctccattaccaactttttaccaaatctacaagagaaaatctacggatggg

SEQ ID NO: 83393 - DNA, 241 bp, Glycine max
  Clone ID: 700957283H1
cctgttcctgctgatggtaaaactgttggtgagattgtgatgcggggtaattctgtgatgaaaggctacttaaagaaccctaaagctaacgaggagacctttgcaaatggatggtttcatccggggatcttgctgtgaagcatccagatgggtatatagaaattaaagacagatcaaaggacatcataatctctggtgctgaaaacatcagcagtgtagagatagagaatactctttactc

SEQ ID NO: 83394 - DNA, 79 bp, Glycine max
  Clone ID: 700957284H1
ctgtgaagaggctccattggatgttgacatcaagggtggtggcagggttgtggtgttgaacaccaagaatcttcccttg

SEQ ID NO: 83395 - DNA, 240 bp, Glycine max
  Clone ID: 700957287H1
gaacaattggacatatagcaccagagtacctctcaactggaaagtcttcagagaagactgatgtttttggatatggtgtgatgcttcttgaactaataactggacaaagggcttttgatctactcgacttgccaatgatgatgatgtcatgttgctcgattgggttaaaggacttctcaaagacaggaaattggaaacactggtagatgcagatttacagggcaactataatgatgagga

SEQ ID NO: 83396 - DNA, 240 bp, Glycine max
  Clone ID: 700957293H1
gaagattctggtgaatgcgtagaaaaggaaaataaagaaattagcgtgaaaaatgttgggtgtgttcagcagctccatagtgtcgccgccggaggagctcgttgccgccggcagccgtacacgtcgccgaagatgacggcggcggcgctgcggaagtggttcgaggagaagaacccctccgcagtgtcggtggaggtcggagagcatgtccagctcgcttatacccaccagaacgagtcg

SEQ ID NO: 83397 - DNA, 171 bp, Glycine max
  Clone ID: 700957294H1
cttaacattcatcttcttcgattcctctacaaattatgattaatattatgatgaactccatcttcgcctcgcataaccttcgcgtcttcggtcccggcttgaatcccttcgcaccttattgatcgccaatcactcccttttcctttccctttcctctcgctaaattacaat

SEQ ID NO: 83398 - DNA, 242 bp, Glycine max
  Clone ID: 700957295H1
ggttcttgaaaatctaatcccatgtcagtggataataaagatggtgcagagcgagaacaatggataaactgtcccttcttgaaggccaagttggctatgaggtgcatagaagtcttggcttattggtgacatgatgagaactagattgggacagggatggggcaagggccagagctagatcatggatagatagttccccaggtgatgatctgtttggtgagtctgctttcctagagcaagat

SEQ ID NO: 83399 - DNA, 244 bp, Glycine max
  Clone ID: 700957296H1
agcgcggttatggtctggtttcgaggaccagtgcctccaggagaagagaagtagtaagagaacgaaatcaagaatcgggattcttgtctcccttgctaccagcagcaatcttgcagcatcattttcaggatcaggattatcaaacgtaatccttaaggtcaaagaaaagttctttgctttcttgctctttgcactgagttatcaaaacgagacaactacttgggtgttgcaggtgaaaggaaca

SEQ ID NO: 83400 - DNA, 265 bp, Glycine max
  Clone ID: 700957301H1
cttttgggggaaaccatcaacgacaacgacagcatcaaaaggaagagaaagacccagaaacgggaacggctttcagaaactcacaagcttttcaaaaagagcttcaaagtgaaggaaaaaagtgccctttgattcttggtcaccacaacgccaagacaaacaacaaacaaagcaaaacacacacacacacacaagcaaactagaggagccaccgcaacatgttttctgtaaccgaatgctataattcaagggagttggtggtggt

SEQ ID NO: 83401 - DNA, 262 bp, Glycine max
  Clone ID: 700957302H1
aactgcaactacaacaacattcattcattcacagctgtcacgccgtgaacggaaaatggcaacggcgagacgcagtttcccgcctatcaccgaatgcaacggaacgacaccgtgcgagtctgtggccgccgacctcgacggtacgctcctcatctcccgtagctcgttcccgtacttcatgctcgtcgccgtcgaagccggcagcctcctccgcggcctcatcctcctcctctcccttccgttcgtcatcatcgcctacctc

SEQ ID NO: 83402 - DNA, 263 bp, Glycine max
  Clone ID: 700957303H1
aaaaaaaatcgtctccttttctctctgcatttgagcaaagccaaaccacgtctgagtgagtgagttccgttggatggcgacgagcaccaccagcagcggtggcggcggcaccggcacccaaacattcaagccgtaccgtcacctgaaaaccctaaaagaccacgagaacgcggtatcgtgcgtgaagttctcgaacgacggaaccctcctagcctcggcctccctggacaaaaccctaatcatatggtcctccgccaccctca

SEQ ID NO: 83403 - DNA, 261 bp, Glycine max
  Clone ID: 700957307H1
attcttatcacatcttaattgattgtttttgctcttaatctttttcaatggaggctgaggttttaagagctaccatgtcaccaccaccttttcctctgtctggttcttcaacaaaaactcacagggcttgctttcccttcaaccccatctcatggaatggcaaaacattgggtctttctcttcaggcatttcccccatcatcctctggacatgtgccatcagagaaaagtgatgatggaagtgaaaacctgacccttgaaa

SEQ ID NO: 83404 - DNA, 262 bp, Glycine max
  Clone ID: 700957308H1
gagagagagagagatggaggagaagacggagaaggtgaagtctgaggcagttcagataattgaagcgtttgaggttctgccaaagctcgtggttttcgatctcgattacactctctggcctttctactgtgagtgtcgatcgaagcgcgagattccttctctgtatccccacgccaaaggcatattgttagctctcaaagagaaaggcatcgacattgccatcgcttctcgctcgccaacggcagacatcgcaaccgctttc

SEQ ID NO: 83405 - DNA, 263 bp, Glycine max
  Clone ID: 700957309H1
ggaatccaatccatgcatccaaattgatagcacgtggattgattacaagatgccaacgtctaaacctcttttccccaaagagaagaaaacataatagatatctcattctcatcttcatctgcatctgcccatgtttcttgtttctgtctgcaattttcaattccaactctctctcacatgcaattctccatccaacaaaagtttctcatcatttctgtttcccataagcaattaattaaaatactgaatttggtataatttct

SEQ ID NO: 83406 - DNA, 257 bp, Glycine max
  Clone ID: 700957311H1
gaaaaactgaagcaaaagaaattagtggcgttattggagaagttagttagcaaagaatggccaacagctaagctttatctctatggatcatgtgctaattcgtttggtgtttctaaaagtgacattgatgtttgccttgctattgaggaagcagacatggaaaaatctaagattataatgagattggcggatattttgcaatcagataatctgcagaatgtgcaggcattgacgcgtgcacgtgttcccatagtaaa

SEQ ID NO: 83407 - DNA, 256 bp, Glycine max
  Clone ID: 700957312H1
cgaccagggccttacgcgtgccgagatgctcgctcttcccaccggtcccaaggagcgttccgccgatgaaatgccgttcaaccgccttggcggcggtttctcctcctatgaccgctccggcggtcgctcgcgcgaccgagacggcggcaacaacgaaggttcgtggggcggaggaggcagaagatcctacggcggattcgacgaggagcgcaggggtccgaatcctagggtttcggaactcgatcagccgtccagg

SEQ ID NO: 83408 - DNA, 257 bp, Glycine max
  Clone ID: 700957314H1
ctatgattgacgatgacggagatgaagatgctgattatgcttttgattacaatgatgatgatatctatgaagatgattattcaagtatgcaggaccaatttgacaatgtggatttgccccctggggtggaggcatcactgccttggttgaaggacatttcttctagtgaatgcaagcaggctattgctttttcccgtacagaatctagttccaaggcaaaagtggatgaaactgatgatatagtcatgcaaaagttt

SEQ ID NO: 83409 - DNA, 123 bp, Glycine max
  Clone ID: 700956547H1
atcacttcgctctccatctctccggatcccactttgcgaacacaattcttcgattcattcagatcataatttcggtcgctaagcaaatgatcccatatcgataacccgatttcaatctcaatc

SEQ ID NO: 83410 - DNA, 265 bp, Glycine max
  Clone ID: 700956548H1
tcggacttcggcttcggctcgagctccggcgtcgatctcagagtccggccactcctctcgccggcgatcccttatacctccgtcctccgttcgagtcctttccgattcgattcgttcccagccttctgcgaccacgaatcccgtctacgtttacatgttcatagctatgctgcttggagattctggtgtaggcaagtcatgtcttctcctgaggtttgctgatgattcataccttgacagctatatcagtaccattggagtggac

SEQ ID NO: 83411 - DNA, 208 bp, Glycine max
  Clone ID: 700956549H1
taaagtttatgggattttcaagtcgaaaagatgaaatctcattggctaaatgtttaattcatctaatcaagggaaagcctccaaagataaagacttcagatgggaattgcttggatgcagtgtttgtgcagtgattttagatttcttcaacgttttcaaaagctagtccaattcaacaatctgtttttattttagatttcttcaacgt

SEQ ID NO: 83412 - DNA, 241 bp, Glycine max
  Clone ID: 700956550H1
cacaaacccgtccctcacactctccaaaccctagcggcactacacactagttctatcgctatctccccaagatgtcgagcgccgatcccgagcacagagaagaggaggaggcacccgccgttggcgacgacgaggacaccggagctcacgtcgctccaatcgtcaagctcgatgaggttgctgtcaccaccggcgaggaggacgacgatgcaatcctggatctcaaatcgacgctttaccg

SEQ ID NO: 83413 - DNA, 77 bp, Glycine max
  Clone ID: 700956551H1
gtccaaagcagttagaggcaatcaattgggaagagaagtgcatgttgcgctactccaaccgcgcaattttccacaca

SEQ ID NO: 83414 - DNA, 255 bp, Glycine max
  Clone ID: 700956552H1
ccggttatggaatgttcatactggaatatgcattttaatatttgtcggagctggaggacatcgtaatgaagttttaagtgttgattttcacccatcagatatatatcgtattgctagttgtggcatggataatactgtaaaaatatggtctatgaaggagttctggacatatgtagaaagatcatttacatggactgatcttccctctaagtttcccacaaaatatgttcagtttcctgttatacaatgcttcag

SEQ ID NO: 83415 - DNA, 71 bp, Glycine max
  Clone ID: 700956553H1
ttaaaattacactaaaacaatgtgcaaaagacaaggcgatttgcgtaattgtcaaccaccacacaacatac

SEQ ID NO: 83416 - DNA, 133 bp, Glycine max
  Clone ID: 700956554H1
aagaatgccacaaatttctccataattatgggaacttccattatcgacgccctgaacgttcgcgtggaaggttccggagacaagtagattgtcctggcccacggcttcggcacggaccaatccgagtggcagc

SEQ ID NO: 83417 - DNA, 255 bp, Glycine max
  Clone ID: 700956556H1
ggttcaagctgctcgtgatgaaatgcaatggggtgaggagggcccacctccattgctggtaaaaatagctccagatttgtcagaagaagaccttgaagatattgctgcagtcgccttggctcttcacttggatggactgattatatcgaacacacccatttcaagaccagatcctaccagttggaatccattggcttcagaaactggttgcttgagtcggaagcctctcttcaatctcgccaccaacatcttgca

SEQ ID NO: 83418 - DNA, 271 bp, Glycine max
  Clone ID: 700956558H1
aattctgctcgatggatgttagacttgggtttgcatcatctaattctgatactgctggtgcttatgctacctggctgctagaatacccatcagcacttacatctcttgatcatatcacaaactatacaagagggaaaagaattgcgtgctttatggattatgatggaactctttcaccgattgtggataatcctgactgtgctttcatgtccgacaatatgcgtgctgctgttaagaaggtggcacaatattttccaacggcaataattag

SEQ ID NO: 83419 - DNA, 248 bp, Glycine max
  Clone ID: 700956560H1
cggcacagaggggaagaagaagatggtgtccttgaagcttcagaagcgactcgccgctagcgtacaaaagtgcggcaagggcatcgtctggcttgatccaaatgaagtcaatgaaatctccatggccaattctcgacaaaacataaggaagttggttaaggatgggtttattatcaggaagccgactaagattcactctcgctcccgtgctcgtcgaatgaaggaggccaagagaaaggggcgtcact

SEQ ID NO: 83420 - DNA, 76 bp, Glycine max
  Clone ID: 700956562H1
gcggcgtccgagccgctcgcatcgcagccaactacggcgataccatcacaaactgcgaacagccacactacacaca

SEQ ID NO: 83421 - DNA, 275 bp, Glycine max
  Clone ID: 700956564H1
acgcgtacgcggaatccggattcggctcgaggtcatattgactaatcaatttgacacagtatcatgagatcaaagtaccttgtgagtaaattaacatgtggacactacgaatgaacacggtactttgctctcatgatactgtgtcatattgactaatcaattttctttgcccttgcttcttaagcaagtgtaactgatggaaacaaaagtctctgtattgtgtaaaaccgtcgttgtagcttcgttcccccacccccttctatgcctttgtccca

SEQ ID NO: 83422 - DNA, 227 bp, Glycine max
  Clone ID: 700956565H1
cacttgtccccggcgagaaaatcgacataatgctgtagatgcatagcagcttgtctggcaccctcatcaaagccaagatcttggtcgtgatctgcggtgagcagaggatcttctacaccgaaaagatatattccatactccggagtcacaatgagaggagtggcatatgtcgttctcggacacgccgtgaagaacgctggtgtaactgtccctgcgtagctcaacga

SEQ ID NO: 83423 - DNA, 216 bp, Glycine max
  Clone ID: 700956566H1
atctattcaatggcatttttcattgttgctgtgtaaatggaagcagttgttattgaacgatttttccaagtatatcagatatttgctggggattaagtgaaaaagactcaatggtaaaaccaaaagtgtctactcaaccaaaaatatgctacaggcctattcgaccttctgacctggacattttagagcatatccatggcagattatttcccatca

SEQ ID NO: 83424 - DNA, 248 bp, Glycine max
  Clone ID: 700956567H1
tcagaagtaactactggagttacaagaattggggactatgaacttcgcgatcttgtattgctagataataatagcattggtgatgtaatacgtgtagaaagtgacgcatttcaggttcttaaggggattcctgacagacctgaagttgtgcttatgaaattaagagagatcaaatgcaagatagatatggtgataagtgtgcaggataggtttaagtctacagtatcgtcaaaggctgttgtgcggat

SEQ ID NO: 83425 - DNA, 251 bp, Glycine max
  Clone ID: 700956568H1
ggccatttgtattgcgggggctttgtataattgtacaattatctacttgtaagaagttcagattcgggcgacaacatttgtaatgcagaattaggtcattaacattgtaaatcttctggcgatgattggaatatcaatgtgaagacgctatatgacttctgctatgacaatatcattgtggttgtcaaggtatttttgaagaaatatcgtggatttacaaagaatctggttaggcttctacaattctttaa

SEQ ID NO: 83426 - DNA, 254 bp, Glycine max
  Clone ID: 700956569H1
ctcaaatactcaactcattagcccttatcttgcccttattcctcttcatgattctgatcctaaaactagggagaaaactcaagagaactgaattgtctctaaacataccccgaggaccatggaaactgcctattataggaaatttacaccagcttgttacatcgacaccacaccgaaaattaagagacctggccaaaatatacggacccatgatgcaattgcaaattggggagatcttcacaatcgttgtttcc

SEQ ID NO: 83427 - DNA, 81 bp, Glycine max
  Clone ID: 700956571H1
gtgcagcctatacttgagtttctatctagccataacttgtagtttacttcaaacttctaagcaacatggtggaccacacaa

SEQ ID NO: 83428 - DNA, 78 bp, Glycine max
  Clone ID: 700956572H1
gggatttccatggaagtctcatgagaagcagctctagtggcgctcgctccggcgctagtggagatgcttcaattccct

SEQ ID NO: 83429 - DNA, 254 bp, Glycine max
  Clone ID: 700956573H1
aaaggttgggaggttgatctagatgctgttgaagctcttgctgatcagaacactgttgctttggtgattataaatcctgggaatccttgtgggaatgtgtacagttaccatcatttggagaagattgctgaaactgcaaaacgggttggaacaattgtgattgctgatgaagtttatggccatcttgcatttgcgggcacgacttttgtgccaatgggagtttttggctctattgttcctgttctgactcttgg

SEQ ID NO: 83430 - DNA, 241 bp, Glycine max
  Clone ID: 700956574H1
atcgcgtttgggagaagaaacagcaaaatcgctgtgaaaatgagcggaacggtgaagaaagttagcgatgtagcattcaaggtgggaaggaacatcgattgggatggaatggcgaagttctggtctccgatgaggctcgcaaggagttctccaatctccgtcgcgctttcgacgatgttaactcccaaatccaaaccaagtttagccaggaacctgagcccattgattgggattactatag

SEQ ID NO: 83431 - DNA, 246 bp, Glycine max
  Clone ID: 700956575H1
gtaaatcaaacgaattcgttgattccatatcgattcgcatttgcgtacacccctgaccccttgatttctctcagttccgttctgcatcatagagtatgtccagccactatcttcgattcttcgagttgaacacaggcgctaagataccttccgttggtttgggaacgtggctcgctgaacctggcgttgttgctcgcgccttggccactgcaataaacgttggatatcggcatatagattgtgcgc

SEQ ID NO: 83432 - DNA, 248 bp, Glycine max
  Clone ID: 700956578H1
accattttgtgcttctttctgtgtgcaagaaaggtaaaagctttcacacaccaagactcgtagccatggctgcttgctcaagaatttctcttttgctccttttctttctctttggattctccgcagctaaggaactattggttggaggcaaaatagatgcttggtagattccatcttctgaatcagattccctcaatcaatgggctgaaaggtctcgtttcagagtcgacgatcatcttgtgtggaaa

SEQ ID NO: 83433 - DNA, 236 bp, Glycine max
  Clone ID: 700956579H1
atcatcactcaaacattaagataagcttatgcctcagccatcgtttctactcgctagagcgtaacattgggcactcagagaagcaaacccagttgtaccatcgttgcgatctttctagcattttgttgtattgtatcttcttcgaaagcacagcttgagagtctccaacatgcgcccatagctgatgggtctctaagcttcttggtggttagagatggggtagaaaaggtgcttat

SEQ ID NO: 83434 - DNA, 249 bp, Glycine max
  Clone ID: 700956581H1
gcgtttcggaagcagacacagatggctcgtacgaagcaaaccgctcgtaagtccacaggaggaaaggctcctaggaagcagcttgcaaccaaggctgcacgtaagtctgcaccaactactggtggtgtgaagaagccccaccgttatcgtcctggtaccgttgctcttcgtgagattaggaaataccagaagagtaccgagcttttgatccggaagctccccttccagaggctggttcgtgaaattgct

SEQ ID NO: 83435 - DNA, 281 bp, Glycine max
  Clone ID: 700956582H1
cacgcctacgaattcgcgctcgacttttggagcagaatcacttatatacatctctccttgcctagtagtcgtagctccatattcccaaggtacctcacctctccatttgtccatggtccgacaggagattagacctcctgtgatgtctgtgccacaatttggtgggtgggaccaaaatgaaccatgagctatcgactatacagtgattgtcactcaaactcgtgaagacaaagagcatccaatcgccaaactgattgcgatacgtaggcaaattttcggga

SEQ ID NO: 83436 - DNA, 248 bp, Glycine max
  Clone ID: 700956583H1
caaccatatctatctattgagaaacatgatgaaggtttcacccttggcattttccattctctttttggccttcaccatagaacatattattggcattgctgcagcagcaccagaagcagtgcttgacacctcaggccagaagctgagaacaggtgtcaagtactacattctgccagtgttcagaggcaaaggtggaggcctaacagtttcaagcagtggcaacaacacatgccccctctttgtggtgc

SEQ ID NO: 83437 - DNA, 245 bp, Glycine max
  Clone ID: 700956585H1
tttctactcatacttgcacttcaatactatgtttctttcaaactcatgaatcgtcactgttagatcagtaatcatgaatcctcttatgatcaagagctgcactgcatatcagtttagctagcagtttgaaccgtattatctgtgaattaccgtaacagcccttcatcacaggaggaatcaactggctggtctaacaatcactctatgcagttttatgttaagattgagattattcgtccaaaaat

SEQ ID NO: 83438 - DNA, 248 bp, Glycine max
  Clone ID: 700956586H1
caggaatttactgcataaaattctgattcgataatctttacctctttgtgttgaattcctatctgaaggattgatttggggattggacctcattgatcgcctgagatcttctccggagctcatgattgtttcgggtcttgatcatagaatggttgatcttcatgattctgaggattggtccctttttaggctcaatgccctttgggaagcccattatcgccatgattctctgctggtgttctcaactg

SEQ ID NO: 83439 - DNA, 253 bp, Glycine max
  Clone ID: 700956588H1
gtggaggggaacggatctgctgggtgggactagataaagtgaagcaagctgacaagactaagggaagattggatggtggaaatggaatcggcagctgaaaaccctaattacccggcggtggactacaagcgaccttccatcttgtcatttcctcggaggcccgccctcagagttacatccgagttcgatagtgaaagcgcagtcttcttccataagatttcctgcaagttgttggacagccttgccaagttca

SEQ ID NO: 83440 - DNA, 249 bp, Glycine max
  Clone ID: 700956589H1
ctttctctctcttgatcaacacccaccacgcgttagagagagaaaaccacgagagatcggaaaatgggtacgcttcagtcttggagaagagcctacggtgccatcaaggacaccaccaaagtgggtctggcccatgtcaatagcgattacgcggatttggacgttgccattgtcaaagccacgaaccacgtcgagtgtccccccaaagagaggcacctcagaaagattctgtttgccacgtctgctgtg

SEQ ID NO: 83441 - DNA, 235 bp, Glycine max
  Clone ID: 700956590H1
atttatcacaaaatttaataatatcacaccttccaacaacccctgcaaacataatcttgggctccagaggaagaagaagatgaacgtggatctggaatcattggcagaggcaacttccggggccataggatcactgatcagcaccactattctctacccccttgacacctgcaagaccaagtaccaggctgaggcacgttcctcaggtcgaacaaaatacaggaatctcactgat

SEQ ID NO: 83442 - DNA, 77 bp, Glycine max
  Clone ID: 700956592H1
ctttttctgaggccctagctttgaaaagccaaggagagtatgatatcgcgtgtgagcatgatcactcatgctgtgtc

SEQ ID NO: 83443 - DNA, 78 bp, Glycine max
  Clone ID: 700956593H1
ctgcccagtttcttctccatctaccacttggctttcacgtttaccttcgcaacgcatcttctctctgaaccctaattt

SEQ ID NO: 83444 - DNA, 52 bp, Glycine max
  Clone ID: 700956594H1
gcgagagagagagagttagggtcgctttaaggcacagaagctttaaatgcga

SEQ ID NO: 83445 - DNA, 274 bp, Glycine max
  Clone ID: 700956602H1
cctccgagcttcaattcaggcgtaataggaagactactgctgtacacaacaacaagaagagatttaatttgaaccaccccttgaattattaagccattattatcactaggtctaatagaaccctcttttgtccttatgtatgttagccattttcttttcttacccttttcatgattttaatttttaatcatcaggggcagttcttttcattattttttttacaacctattcactgtaaaatctttaggaccgattctgtattctctttggtgca

SEQ ID NO: 83446 - DNA, 274 bp, Glycine max
  Clone ID: 700956603H1
gtttctctttcttctctctgtgctttcaaccaagttctcaaatcactcttcttcttcacccttctgatctactaattctcaaggtattcaaaattgggtggttttcgattgaactgtgatgtccaagccactgctaggcatagcggaagaggaaggtcaaagcaatgtcactttgttggtttcttcctcagccaccatggaaagtgtgtgcctgaatagctcaaaactgaaagagcgcaactacatggggttatctgattgttcatctgtggac

SEQ ID NO: 83447 - DNA, 271 bp, Glycine max
  Clone ID: 700956605H1
gtttggggtaggaataatatcttacacggtgcctgtgtacatagctgagatatcacctccaaacttgagggggggtttggtttcagttaaccagctctctgtcaccattggaattatgctggcatatctgctggggatttttgttgaatggagaatccttgcaattataggaattttaccctgtacaatattgatacctggcctatttttcattcccgagtcccctagatggctggcaaaaatgggaatgacagaagaatttgaaacttcc

SEQ ID NO: 83448 - DNA, 268 bp, Glycine max
  Clone ID: 700956606H1
ctcttctttcttcttcttccatctctttttttctgattaaggtctacaaaagttctcttcttcttctcctcctattgaactttggtcatcacacgagaaaacccacgtctggatcttctggtgtaaaggccattagaagccttttagaaattttcaaattgagttggtgtatagtgttgaagggggtgaaatttggagcccagtttgttacttcatttgaaaggtcatagtttgaaccctctttttctggagatttacctgggaaaag

SEQ ID NO: 83449 - DNA, 268 bp, Glycine max
  Clone ID: 700956607H1
ctcttcaggtcaccatcttgactgcaatcatggctgatggaccacagcatccatcagttgttcagaagctagctggacagtcttacctggtgtccaggcttagccccaactttttctctaggaattattctgcaactggttcttacctcaatggcggaatgcactcgcctgggttggctgttgtgtcacctgtatctccagttactgtgcatgctccagcagagaaaggagtgcgtggatttctagtggattttctgatgggtggagt

SEQ ID NO: 83450 - DNA, 250 bp, Glycine max
  Clone ID: 700956608H1
ccttgtgaagttgaagggacacctcacccacccgaaacaccatccattctcagccaccaccctctctctcaaacccttagtttccattctcaagagtgaaactcttccaactatctatacataaacatatctcttcagaacccactccctcacttctggaatctagccataaaaatcataaatttccctctttcacccgaatctctataccgtatccatctgaatccaacaaattttcacacaacatacg

SEQ ID NO: 83451 - DNA, 268 bp, Glycine max
  Clone ID: 700956609H1
gtttcctttcatatgctactcctctaaaccatttttctcacaaatggctacctattcttctttcagttttgtacccttttgcatgttcttcttccttgtgtgcctcactagtcctgcttatgtttcttcacttcctctttccctgagaaggcaagcatcaatccttgtatctatgaagcaagatttttgagttgcaaactcttctctgaggagctgggacatgtcacattacatgtccctttgcagcacttggtatggcattcagtgt

SEQ ID NO: 83452 - DNA, 246 bp, Glycine max
  Clone ID: 700956610H1
attaccctagtttttctccattttcttcataattgaaccgtttctcctcgatcccatatgtgttgatagtgaaaggcatcgtcctcatcatcatctatcatggcatggtttagagctggagcaagcatagcaaaacatgcaattaggagaactctttctaagggtggatccacacaccttgtgtcaaaggcaagggtccttccatcgataccatcatcacatagcagaagcttccacacaacatac

SEQ ID NO: 83453 - DNA, 278 bp, Glycine max
  Clone ID: 700956611H1
gaatacggctctcggtattcagctcaggatcagggcatatccatggcagaaccaccaaagggggatgaggaggacggcggagctgctttcgttctccaatccaaaggtgaatggtggcatgcggggtttcacttaacgaccgcaattgttggacccacgatactaaccctgccatacgcgttcaggggattgaggtggggacttggatttatgtgcttgacggtgatggggatcgtcaccttctactcttacttcctcatgtccaaagtgctcgatca

SEQ ID NO: 83454 - DNA, 263 bp, Glycine max
  Clone ID: 700956612H1
aactcaagtagcaactacattgataaaatctgttccaacaactccaacatttatggcacctcctcaggcagacctatggaagattggcgcagaaggctttgctctgatagacaagttctatggtccatcaagggggaacagtgccaatgatgcattccatgggccaaggggagaacattgttgggtggtttataatgtgtccaatgatgtgatggaagaatctgctgtagacccatgaaattctaagctttttggcttatgca

SEQ ID NO: 83455 - DNA, 261 bp, Glycine max
  unsure (1)..(261): unsure at all n locations
  Clone ID: 700956613H1
cttcgtctcaaacctcttcgttccttcgattcattccatttcttccaaaatggccaaagacccagttcgcgttctcgtcactggagccgcagggcaaattggatatgctcttgtccctatgattgctaggggagtgatgctgggtcctgaccagcccgtgatcctccacatgcttgacattcctccagcagtagagttctagantggggttaaaatggaattggtggatgctgcattccctcttcttaaaggtgttgttgc

SEQ ID NO: 83456 - DNA, 263 bp, Glycine max
  Clone ID: 700956614H1
aggcgttcgggttctactacaaaaagacaccactgaagcgaagaaaggggcgtacggttctgttgtggttggagatccgaattttgattatcgaatcgcaaaattctgaatcaatcaatcaatcaatcagtaatcagagccatcaacgactgcaatggtctgcgagaagtgtgagaagaaattatcgaaggtgatagtaccagacaagtggaaagaaggggccagcaatactaccgagggtggtggccgcaagatcaacgaga

SEQ ID NO: 83457 - DNA, 264 bp, Glycine max
  Clone ID: 700956615H1
ctcaagccctccgcctccgtcgcactccaccgccactccaacgcgctcgtcgacgttcttccgccggagccgactccagcatctcgctcctcagccagtccgagaagcctgacgtcacttataatgacattggaggatgtgatatacagaaacaggaaatccgtgaggctgtggagctaccccttacacatcatgaactatacaaacaaattggtattgatcctccccgtggtgttttactgtatggaccccctggcactggca

SEQ ID NO: 83458 - DNA, 266 bp, Glycine max
  unsure (1)..(266): unsure at all n locations
  Clone ID: 700956616H1
attcaaaagtttttgaaatgttgtcaccccttcttctatttctatgcctaactcttcctttgtttttgttgtccttcttcaaataccgtaaaaccttcaagaatccaccacttccaccaggtcctagagtccatcncataatagggaatcttcatcaactagatagtccttctcttcatgagcagctatggcatctctcaaagaaatatggtcctttattttcacttcaatttggattaaggccagccatagttgtttcctctcca

SEQ ID NO: 83459 - DNA, 277 bp, Glycine max
  Clone ID: 700956617H1
cagcagttttcccaactccgaacttatcgaagaagatgactcgcggcataaaacaccgtcagaaagccaagagcaagaagaaggtctcgaagaaagagagtgggtcttcttcatctttggcgccagaaattcccgcgaaggtgtggcaaccgggtgtggataagttggaggaaggtgaagagcttcagtgtgatccttctgcttacaattctcttcatgcctttcacattggatggccatgtttgagctttgatattttacgtgactctttgggctt

SEQ ID NO: 83460 - DNA, 271 bp, Glycine max
  Clone ID: 700956618H1
ccattttgttgaaggaagcagaagcacatggcagtgatatgtccgccaagccagggacaaacttggcttccccatggccccaattctaattaccacttcttctcaagaggaggagttggaaggcgcagtcgttcttattgtactttcagctcaccaaagaccaaaacgaatgcgtttacggtcagaggctgcggccaggactcggtggaagaccatcactttgtgaaggctctgagggaatcccaaccttacatttccgttcataggggca

SEQ ID NO: 83461 - DNA, 268 bp, Glycine max
  Clone ID: 700956619H1
caaaaccttgagaaaactgagcatggcggagagtggcggaggaaatcgccggagagaaccgcttctggtgtcgccggaggaagaggctgcaaaagcatcgtggaggcttaacgtcaaagagtttcgtttgccaagccaaacgaatgatcatcaaaatcaacgatccttcactttccatggccttcttcgtaaacccaggaagcaacgcaaagtggcagaatattacaagaatcaggagagactccttgaaggatttaatgagatggag

SEQ ID NO: 83462 - DNA, 269 bp, Glycine max
  Clone ID: 700956621H1
cttaaatctctaataaaaaaccactggaagatgtaattcgtgagattttttgattgctggaatgattttcaagaaaaggccacaacccaagtcttgattgttttggacaagcatgagaaccgcgatacttatgtggtagctttccgaggaacggaaccctttgatgcagatgcatggtgcactgaccttgacatctcatggtacgggattcccggcattggagaaatgcatggtggcttcatgatagccttagggctacagaaaaatgt

SEQ ID NO: 83463 - DNA, 260 bp, Glycine max
  Clone ID: 700956622H1
agaatatgtatgctcagttgttgcctcttgctttgcccgcaccaccaatgcctggaatgggaggaggctttgcgcctccccctccaatgggtgcattggggatgcctccaatgcctccttttggaatgccacccatgggcagctactgacatataagttctcggcaatgaactcaagtgtataccgagagcagcgtagcaacttgggagttttcaaacattttcttctggggttttaatgcagtattctttccttgcttc

SEQ ID NO: 83464 - DNA, 264 bp, Glycine max
  Clone ID: 700956623H1
aaaaaaatgggttcttctctgtggacctgtctgattttgttatcacttgcttctgcttccttcgccgccaacacaagagaaacaattgatgtgccatttggcagaaactatgtgcctacctgggcctttgatcacatcaaatacctcaatggtggttctgagattcagcttcatcttgataaatacacaggtactggcttccaatcaaaagggtcctacttgtttggtcacttcagcatgtacataaaattggttgctggtgat

SEQ ID NO: 83465 - DNA, 265 bp, Glycine max
  Clone ID: 700956624H1
cgtttcgttcaactttcaacgccagttcacactctctgcttcgcgtgtaccaacaagtgcaagttcgaatcaatggccagcgctcagctcacagcaatagcgtcatcgatctctacggcgtcgtttgaagggcttcgaccttccgctgttcagtttgcttccacgggcagaattagaattggcaatctctcccaaaggtccttccggggcttggttgtcaaagccgccaccgttgttgcccccaaatacactgcgataaagcctc

SEQ ID NO: 83466 - DNA, 263 bp, Glycine max
  Clone ID: 700956626H1
ggaacttactcatcttgaagtgaatggatgccacaatattggaactttggggctagaatctgttggaaaatcctgccaacatctctctgagttagcattgctttactgccaaagaattggtgatgctggtcttgtccaggttggacagggatgcaaattcttgcaagcacttcaattggtagattgttcaagcattggagatgaagccatgtgtggcatagctagtggctgtaggaatctaaagaaacttcatattcgtcgct

SEQ ID NO: 83467 - DNA, 86 bp, Glycine max
  Clone ID: 700956627H1
ttttggttggaacccctcttctttttttctcttgtcttttcttttgttctcatcatcgtctcaacaacgagttaaaggacaaagga

SEQ ID NO: 83468 - DNA, 83 bp, Glycine max
  Clone ID: 700956630H1
ggcaacagcacgacgtggatgaacactgccgttttggcaacatccattcggcactaccgttcaaacagcggccccgcgtcggg

SEQ ID NO: 83469 - DNA, 263 bp, Glycine max
  Clone ID: 700956631H1
caacaacagagaacacgagtttgcagccataaaaaaaccccacacattcagacatcgttgtgttgtgtaatgctatctccgatggctctctctgcgcatatttgccgtttccccgccacacgcgctgacacttctttgccggagagtctcaccagaatccggtgccggaaacctctctccgtccgatgctccggcgattccacttccggctctgtgggttcggagttcgatccgaaggtgtttcggaagaaccttactcggag

SEQ ID NO: 83470 - DNA, 265 bp, Glycine max
  Clone ID: 700956632H1
gttaggatgctgcacaacatgctcggttccttgatcaacaactttgactggaagcttgagaacaacattgaccccatcgacatggacttggatcagtccctcagggctatccctgttctcgtaaatgccaactaattcaacatcatctgtatgttggcatgccatcccatgtacctttttctcagaaacagcaaacagaagcttgattctttggtttgaatgtttctcgtatgtgctagctttgatccagcttgtttcttccagc

SEQ ID NO: 83471 - DNA, 275 bp, Glycine max
  Clone ID: 700956633H1
cttggaagcccttaagtccctgtgttggagatgcaagggtattcaagtggaggaggcacaacttatctgtctagactcccttggttttgatctaagagtttgttctggaactcagattcaaacactgagatttacattcaagaacagggccacttccgagtacagtgctgagagacaactcaacgatatactatttccaagaattcacccaaagcagcaaaaaatgaagcaaacacatcaaaatgaatgctaaaatcatctgagtgtcatcatac

SEQ ID NO: 83472 - DNA, 271 bp, Glycine max
  Clone ID: 700956634H1
aacagcacaaagcgggttactgtctgttcaagctaccatctctctctctctttcttagtgcctccttgccaggtgctgccactctctctttctctctcttcatccttctgttgggttggttgtggagtgttgttttctgttgtgcacgtgttgtcattttttaccctcgccacagatctgaagtgttcaagtttggattttgtgcttctggaagttaaaatggcccaagaaactttcctattcacatctgaatcagtgaacgaggggcacc

SEQ ID NO: 83473 - DNA, 267 bp, Glycine max
  Clone ID: 700956635H1
aaatatcctagtccttatcagcttcactatttcgattgaactcgccgaagaaggtattgacgtcgatgatgaaaatgaaattggtgaaaacattactgcttctcctttgtgtgaaactcttctgttatgcagtgattggtgctcctcaaacttgtcctgctaacaatgaggataaatgcggcgattcagatgaatggaaaggggagtttttccctgacattcccaaaattaaatatgagggtccgtcaagtaagaatgtgctttcat

SEQ ID NO: 83474 - DNA, 269 bp, Glycine max
  Clone ID: 700956636H1
gctcgtcactccttgctcttagccctcctcctcttcgccgccgtcccaaccgccgcgatggcggtggccgcgtccgacgccgacgacatcctgatccgtcaggtggtgccagatgttggcgaagcgacagaggaggacaacctgctgaacgccgagcaccacttcgcgaccttcaaggccaagttcgccaagacctacgccaccaaggaggagcacgatcatcgcttcagcgtcttcaagtccaacctccgcagagccaggctgcacgc

SEQ ID NO: 83475 - DNA, 267 bp, Glycine max
  Clone ID: 700956637H1
cccagtcataaatgttcacatatggtttgacagacaactgaagaacacatatgatcaccttctctttagcagaagtccccttctgagtgtatatgctgacatgtcagtaacttgcaaggaatattatagcccaaaccagtcaatgttagagttggtttttgcaccagccgaagaatggatttcacgtagtgacgatgatattattcaagccacgatgactgagcttgccaaactctttcctgatgaaatttctgcagaccaaagcaa

SEQ ID NO: 83476 - DNA, 266 bp, Glycine max
  Clone ID: 700956639H1
tggaaagcctctccattacaaaggtagctcattccatagaattattcctagatttatgcttcaaggaggtgattttacacaaggaaatggaatgggtggagaatcaatttacggagagaagtttgctgatgagaacttcaagttaaagcatactggaccaggacttctatcaatggcaaatgctggtcctaataccaatggttcacaatttttcattacaactgtgacaactagctggttggacggaaggcatgttgtttttggta

SEQ ID NO: 83477 - DNA, 262 bp, Glycine max
  Clone ID: 700956640H1
cttctctatctaaaatggagtttgttctaaattacctaaatgccactgccattggagttctttctataaccctcttctttttgtttttgtataatcccttcaaatttgcattaggtatcaaagaggctcccaaagttgcaggtgcatggccaatacttggtcacctaccactattgagtggttcagagacacctgatagggttttgggtgctttggctgataagtatggacccatattcaccatcaactatggtgtcaaaaa

SEQ ID NO: 83478 - DNA, 264 bp, Glycine max
  Clone ID: 700956641H1
tggaaatgtcatcaatgctcaaccttggggttctggaggtgacaaccgagaactgtggaatggtagaaaaaccggagaaatcaagcctgatgtaaaaggagctgagcctgagaaaggttcagaaaggttctggaaactgctgagtaagcctttggaaggctaccaaggaggtaacaatgaagtgattgagcgtagaaacccattagccttagctcatttcgccaatcaccctccaaaaggggtgcaaccaaatgtcatgatttg

SEQ ID NO: 83479 - DNA, 254 bp, Glycine max
  Clone ID: 700956644H1
gttgaaatgaaaatgggttcttctttgtggactttgtgtctaatttaggcttcactagcctcttctgcattctgtgcctttccacggaggccagtggaagttccattcggcagaaactacgttcccacttgggcttttgatcacatcaaatacatcagtggaggttctgagattcaacttcatcttgacaagtacactggtactggcttccagtccatagggtcatacttgtttggtcacttcagcatgaacat

SEQ ID NO: 83480 - DNA, 279 bp, Glycine max
  unsure (1)..(279): unsure at all n locations
  Clone ID: 700956648H1
tcggagttcggcacgaggcatctttaccatttcagtcctaaaaccctattcttcttcgctcattcatcagcactgccatcagccccaacctccccacaaggtcacaggccacanagaggtgtaccaccatgtcggacgatgaccgggaggagaaggagttggatctctcttctgcagaagttgtaaccaaatacaaaaccgcggctgcgatcgttaacaaggccttgaagctagttatttcagaatgtaaaccagaggcgaagattgtggatatttgtg

SEQ ID NO: 83481 - DNA, 264 bp, Glycine max
  Clone ID: 700956651H1
atactcactagtcactatagctcacccttgaagaagtgcaatttcatcctctaactcttccaaatcatggctagctcactgcttgtcatgaaggttacaagctgcatggttgcggtgttgatggttagttttggacacataattcccttggcagaagctgaaattccatgtggcagggtgcaaatcacagtggctccatgcatagggtacctaaggggtcctggtggaggtgtccctgcagcatgctgcaatggggttaggagc

SEQ ID NO: 83482 - DNA, 85 bp, Glycine max
  Clone ID: 700956654H1
atagatcgaattcggatatggcgaggaacacagctgacctcgtaacgcagctcaacgttgctcatcactttccacacaacatacg

SEQ ID NO: 83483 - DNA, 261 bp, Glycine max
  Clone ID: 700956655H1
ctcactttccaccttcctaatgagcacctctttcttactttatggattattcaacgatgatgcttttatttatgtgccaaatgggataggaactattttgggaatgatacagttgatattatacttctacttcgagagtaaatctagagagagctccagagaacctctgatagtatcatatgcatgatgagttctgctgaaaaggctgaagaatcagagtcaggaacgaccttttgctgctggttgctggctgagactgga

SEQ ID NO: 83484 - DNA, 262 bp, Glycine max
  Clone ID: 700956656H1
gtttttatcagaagcttgtgatttagtttttgatgcagcaagtgagggaaaacaattcttaattgttggtacaaaaaaaaaagcagcggatttagtagcacgggctgcaataagagctcggtgtcattatgttaataaaaagtggctcggcggtatgttaacgaattggtatactacagaaacacgacttcaaaagttcagggacttgagaatgcaacaaaagacggggagactcaatagttttccaaaaagagatgccgct

SEQ ID NO: 83485 - DNA, 261 bp, Glycine max
  Clone ID: 700956657H1
tgccgattacaacatccaaaaggaatcaaccctccatctcgtgcttcgcctcaggggtggcatgcaaatctttgtcaagactttgaccgggaagaccatcacccttgaggtggaatcctcggacaccattgataatgttaaggccaagatccaggacaaagagggcatccccccagatcagcagaggctgatttttgccggtaaacaacttgaggatggaagaacccttgctgattacaacattcagaaggaatccaccct

SEQ ID NO: 83486 - DNA, 256 bp, Glycine max
  Clone ID: 700956659H1
gtgcaatccggtgtgggcatttcaatccataaagtcccaaaaacactgacagcgagaccaactcaaccacctcttccagttgcagacttgagttccttatgatgggaaccgcacgtatcccaactactaatgttgttctcaaacctcaaaacttatctgggaatttctctaccctctgtgataactttcggtgtctgaggttcctcactccgaaaccgccccacctgcgatcctctcactctaagttgggaaatag

SEQ ID NO: 83487 - DNA, 257 bp, Glycine max
  Clone ID: 700956663H1
attaaattcaacatctctctaattctctcattctctctctacttctcaaagatgcacgcatagttctataaccctaatcgggtatgtagaaagagagctttgtagcacgtgcttaaggtatgttttaaacattgcttgtttagttggttccttttgatgtcatggtggcattgtgatgcaaaatgtgtgtgagctcatactgagaaggagctcatctgctaagtccatttgaagaggatgtatggcagggcatcatc

SEQ ID NO: 83488 - DNA, 267 bp, Glycine max
  Clone ID: 700956665H1
gtttgttccatttcttgcttcttaatttcttgatcatgtcacttgctggtaaaatcagcattgaaattggggtgcatgcaagcgctgcaaagtggttcaacctctttgcaacgcaactccatcatgttcaaaaccttaccgaaagagtgcatgaaaccaagctacatcatggtgatgactggcatcacaacgaatcgatcaaacactggacttgtaccatagatggtaaggttacaacatatcacgagagtaacgaatccgttgatg

SEQ ID NO: 83489 - DNA, 265 bp, Glycine max
  Clone ID: 700956666H1
gattttaagtacagaagcattgatggtgatcttgttggtgttgttggagactcatgggtgttggaaaccaatgctattcctgtgacatggtattctaacaaaggtgtggacaaagagtcttatggcgagattgtctcggcgcttgttaaggatgttcgagcgctgaattcttcagcaataggaacaaattcatcttatttctatgggaagcaggttggaagggcggcgaggttggtgttgatagcggaagaagtgtcgtatccta

SEQ ID NO: 83490 - DNA, 261 bp, Glycine max
  Clone ID: 700956669H1
agaagaagaaaaaaaccacaaccaccaccatctagggtttttctttttctcatggctagtttgtcaactaggattttcttcatcatgtcccttgtgtgcctggctctcggtccaatggcacaaggggaaatgacatgtggccaggttgtgagcaacctgaccccatgcatctcctatgtggtgtatggtggaaccaatgttcctgaacagtgctgcaatgggataagaaatctctatggcatggctcagaccaaaccagac

SEQ ID NO: 83491 - DNA, 259 bp, Glycine max
  Clone ID: 700956671H1
accggcgctgccggcttcgtcggctcccacgtctccctctcgttaaaacgacgcggagacggcgtcgtcggactcgacaacttcaacgactactacgatccgtctctgaaaaaagcccgcaagtccctcctcgccaagcatgacgtcttcatcgtcgatggcgacctcaacgacgccaagctcttggcaaagctcttcgatgtggtcgctttcacccacgtgatgcacctcgcggcgcaggccggggttcgctacgcca

SEQ ID NO: 83492 - DNA, 232 bp, Glycine max
  Clone ID: 700956672H1
gcactcttagaaggcattactgatacacttggaaccgaactactcgaaagcttgttaaaaatggcaccaagcaaggaggaagaacgcaaattgaaggaacataaagatgattctccaaccaaacttggtcctgctgagaaatttttgaaggcagtgcttgatgtacctttcgcatttaaaagggtggaagcaatgctttacatagccaattttcactccgaagtggagtatc

SEQ ID NO: 83493 - DNA, 254 bp, Glycine max
  Clone ID: 700956674H1
atttaatcctatcctatcgtagcaaagaaagaaagaaagaaaaccctagcttaccttttcaactttcaagatgcaaatctttgttaagacactcactggtaagacaatcacccttgaggtggagagttcagataccatagataatgtaaagtccaagattcaagacaaggaagggatcccaccagaccagcaacgtctcatttttgctggcaagcagcttgaggatggacgtacacttgctgattacaacattc

SEQ ID NO: 83494 - DNA, 252 bp, Glycine max
  Clone ID: 700956677H1
gggcttactattgggcacatgatgagaagcttctcatcagtgatcacatctccaatggcaatttgactcatgcccttagagggagacatggccaaccatctacaaatcattcatggtccaccaggctgagaatcaccaaaggaacagcgaggggcctggcctatctccacgaatgcagtccaaaaaaattcgtccatggcgatatcaagccctccaacattcttcttgacaacgacttccaaacctacatat

SEQ ID NO: 83495 - DNA, 256 bp, Glycine max
  Clone ID: 700956678H1
tgctcatttgctcattattcatctcttccctctctactacttctcttgctcttattttctgatacacaagagatggaagatgatgaatctcctcagatcaaaggagttgttataatctcccttccacccccagataacccctcttttcgcaaaaccatcactgcttttactttctcttacccttctcctcaaccttctattcaaccccaccaacaccaaagtcaaccaacacaccctaatgctcaacacaacactg

SEQ ID NO: 83496 - DNA, 77 bp, Glycine max
  Clone ID: 700956679H1
cttcatcatgcacaagagctcttcagattccacataaggtacgactacactggacctctcacaggccttcttcaggg

SEQ ID NO: 83497 - DNA, 164 bp, Glycine max
  Clone ID: 700956680H1
atgatcatgaagttctctttaaagttaaattattatcatcaaccatccaaggatttaagacgaaaggaacaagtacaaccctcgaaagtgaattaggaagaaaacacaaggaaggttgatgatcatgaagttctctttaaagttaaattattatcattttgtgc

SEQ ID NO: 83498 - DNA, 265 bp, Glycine max
  Clone ID: 700956681H1
gcttacttgatccgtaggtcaaaggctcttcgtgcccttagagaactggccattgcaaaatctaaattaaaggaaatcagagcccagttcaataacttttcctaccgacgtcatgtagcttgtaatgcggaggaacgccagcgattttctgagaaaataattgtcttgctccttactgttgatgccattgagggagctgatattatggtaagatctgccaagaggtcaatggtggatgagctggaagcaatgcttgatgtggtag

SEQ ID NO: 83499 - DNA, 263 bp, Glycine max
  Clone ID: 700956682H1
gctacggctgcgtaggataacatctaacaaacctagcgcacgatagtcttccttcacccatgcttggagtactctgcgccactcgccccaaaccttggcttctctccctcgtccacgtccacgcttccctgcctcgcctacctcattcccctctatcaccttcagcctcgccgccgccccgtcgccgccattccaccgcctgcaaactttttctctccggcggcgctgccgcctccatatggcacgctatcatgccccgaggt

SEQ ID NO: 83500 - DNA, 260 bp, Glycine max
  Clone ID: 700956683H1
cttttaaaatatacgagtggcatatttatcttctaattttataaagtttcccatgaaagtatcttgtcatgcatcataacagtcctacaactgcttaacaagtggaaactatatgttcaattaataaccagtcactaactctatctgaaatagtattatgttgtatgtatatcatgggagagcttagtgcctttttctttcttctaatatgtaatttgatattctagcttcccattgtattgcttcagaagatcaggcta

SEQ ID NO: 83501 - DNA, 257 bp, Glycine max
  Clone ID: 700956684H1
cctcgagccgattcggctcgagcataaacccggcggtgacgttcggactgtttttggcgaggaaggtgtcgctgacaagagctgttgggtacatggtggctcaggtgttgggggccataagtggggtggggcttgtgaaggctttgcagaagagctactacaacaggtacaaaggtggcgtgaacatgctcgctgatggttacagcaaaggaaccggtttgggcgctgagattattggcacctttattcttgtctac

SEQ ID NO: 83502 - DNA, 256 bp, Glycine max
  Clone ID: 700956685H1
ctctcactcgctctttcagcttcgactttggtggaaactaaagactagtcaaaatggtgaagttcacagctgcagagctgcgtcgcattatggactataagcataatatccgtaatatgtctgtcattgctcatgttgatcacggataatcaaccctgactgattctcttgtggctgctgctggtatcattgctcaagaagttgcaggtgatgtccgtatgactgatacccgtgcagatgacgctgagcgtggtat

SEQ ID NO: 83503 - DNA, 258 bp, Glycine max
  Clone ID: 700956686H1
agaaagttcatccaatctccgaagcccttcaccgcattgcaaccatgtcgagaagaaaggttagagagccaaaggaagaaaacacgactctgggcccagctgttagagatggcgaacatgtctttggcgtcgctcgcatctttgcctccttcaatgataccttcattcatgtcactgatctgtccgggagggaaacacttgtccgcatcacaggtggaatgaaggttaaggctgacagagatgaatcgtctccctatg

SEQ ID NO: 83504 - DNA, 256 bp, Glycine max
  Clone ID: 700956687H1
ctagaatcttctctttctcttatcctctccgtaaccgttaccgttacgcccgtcccggtttgaagttctgacccgactgtgatttttttaaacggaagggtggatgatctgatctaaactagggggtgaaatgtttaaaggtttggagtagcgtatgggccgtgaggctatgattatgtatcatgtaacttgtaacatatttcttgggttgtttattaaaacattaaaataaaatttagggtttatatacttgtaa

SEQ ID NO: 83505 - DNA, 256 bp, Glycine max
  Clone ID: 700956689H1
ccaaaaccgaaattaacaaaactcatttttccaatggggtgtgccagtttttccttcctccttaaaattattccttccccctttcaatccctttgaccctttctgcatttcagatctaagaccataagacaacacaacccatttaggttcatcactctctacagaacaaggaactccaattgggtaccactagattataaagatttcatttttattattcttcttattattaaatatttaagggtgggggcgagag

SEQ ID NO: 83506 - DNA, 252 bp, Glycine max
  Clone ID: 700956690H1
gtcctttctctaatccagatatctctccgttaatgctctcaccacaaacttcaatacactagccaaaagctaacaccaactataggccaaatcaccaataaatattatttcccgttcttttggcgtgttggccacccactgaacacatttgcactcacacatagatcccgagagaggccattggttggtttcagagatgggaagcatgcacatagaaaccccagaaacttttgctgatggtagcaaaaactt

SEQ ID NO: 83507 - DNA, 251 bp, Glycine max
  Clone ID: 700956691H1
agaagacaaaccaatctcatatgaaaaagcaaagaaatactttgctcaagatccttcccaaaagtgggcagcatatgttgcaggggcagttttggtcttaatgactgaaatgggtgttcaatttgaagacagtatcagcatgctggtttcatctgcagtcccagaaggaaaaggcgtatcatcttctgcatctgtggaggttgctagtatgtatgctattgcagctgctcatggattaaatatcagcccaa

SEQ ID NO: 83508 - DNA, 249 bp, Glycine max
  Clone ID: 700956692H1
cacggaatttgtaaatcaaacgaattcgttgattccatatcgattcgcatttgcgtacacccctgaccccttgatttctctcagttccgttctgcatcatagagtatggccagccacgatcttcgattcttcgagttgaacacaggcgctaagataccttccgttggtttgggaacgtggctcgctgaacctggcgttgttgctcgcgccttggccactgcaataaacgttggatatcggcatatagat

SEQ ID NO: 83509 - DNA, 251 bp, Glycine max
  Clone ID: 700956694H1
gccgttcgttcacagcgtagctctgctctcgaagatggctcctcccagaggtggtggtgggttcaggggtggtaggggtgacagaggtagaggaaggggtggcggtggaggaagaggaggagacaggggtacgccgttcaaagctagaggcggtggccgtggtggccgcggaggaggcaggggtggtggccgtggcggcggcagaggtggaatgaagggaggtagcaaggttgtggttcagccccataggc

SEQ ID NO: 83510 - DNA, 253 bp, Glycine max
  Clone ID: 700956695H1
gtgaaagaaaggcagcgatggaagaagacttcgacatccccggcggcgaggaaatggatctcggcgaagacgaggtcggcgaggagagggagatcggctctggcggcctcaagaagaagctcctcaaggaaggtcaaggctgggaaacccccgaagtcggtgacgaagtccaagttcattacacggggactttgctcgacgggactaagttcgattcgagccgcgacagggattctcccttcagcttcacgct

SEQ ID NO: 83511 - DNA, 255 bp, Glycine max
  Clone ID: 700956696H1
attgggaaggatctttctggagtttgtctccctgtttattttaacgaacctctgtcttcattgcaaaagtgttttgaagacctagagtattcatacctggttgatagagcattggagtggggaaagcaggggaatgacttgatgagaattctaaacattgcagcttttgctgtgtctagctatgcgtcaactgaaggtcgacaatgtaaaccttttaatcctttacttggggagacctacgaagctgactatcca

SEQ ID NO: 83512 - DNA, 266 bp, Glycine max
  Clone ID: 700956701H1
cgatgtggatgctgatgctggtcacagctgtgaactgggtggggtggtttccttacttccttttcgacactgactggatgggtcgtgaggtctacggtggaactgctggggaggacgcgtacggaagggagtgcgcgtgggatcgttagggctgatggtaaacgccgtcgtgttgggcttcatgtcgttggcggtggagccgttggggaagatggttgggggagtgaagaggctttgggcgattgtgaactttattctcgcgattg

SEQ ID NO: 83513 - DNA, 257 bp, Glycine max
  Clone ID: 700956702H1
aaaatccagaaagaaccaggagaggaaagtctttcagtctttctagttccacccaccataagaaatcaccaatactaataataatattattattattctcacgggtaaatacataaataaaatggtgcgtgcatagtaataggctaatagggtagtattttcttcatgttgggtagttggaactccttaagcagcttcagagtctgagaagtgagaagcggaagaagaagcgatgcgtttttgcccgtgttttggat

SEQ ID NO: 83514 - DNA, 255 bp, Glycine max
  Clone ID: 700956703H1
gagtactcgaatgaagattgctgttggagctgctcgtggccttgaatatctccattgtaaagcagatccacctgatatatacagggacttgaaatctgcgaacatcttgttagataatgaattcaacccaaaactgtcagattttgggcttgctaaacttggacctgttggagacaatacccatgtttcaaccagagtgatgggaacatatggttactgtgcaccagagtatgccatgagcggcaaattaactct

SEQ ID NO: 83515 - DNA, 73 bp, Glycine max
  Clone ID: 700956707H1
ttcatccattcctaatccttgcttggccactttgcgcatttcaattcttctttcggttttttcctgttttggg

SEQ ID NO: 83516 - DNA, 252 bp, Glycine max
  Clone ID: 700956708H1
aacgacatctgtttctggctttgcgggctgaacaatggccggaaaacatgtcggcggcgagggcttagcggcgaacctcgccggaatgtcgaagaatcagctctacgatatcatgtctcagatgaagaatctaatcgaacagaaccagcaacaggccaggcagatcctcatacaaaatcctatattaaccaaagcgcttttccaggcacaaattatgcttggaatggtgcaagcacctcaagtggtttcaaa

SEQ ID NO: 83517 - DNA, 255 bp, Glycine max
  Clone ID: 700956709H1
ggaaagttttggttagaataaaatggtaccctgtctgcaatgcttcttgggtgagtggcacagccccgtttggcacggattttgcacggaacagaatctgaaaactgcagaaacttctcaatggcagctatttcagctgaagtatttggcaaactcaactgatgggccaaaggagcatgagtctgtcctgtttcattctgatgaacaacaaaaattcatgtcaatgcgaggcacatccataaattctgggtcctc

SEQ ID NO: 83518 - DNA, 210 bp, Glycine max
  Clone ID: 700956711H1
gagtatgcaaaaagcccaagcagtcgtcttggtgctgccgattggtcaaaatatataaatccatttgttgaaatttgttactgtattgcattgcgtttgctgcacccattaatggcaggcgtttctctcaagtgcggtgactgcggtgctctgctgagaaccgtagaagaagcgcaagagcacgctgaactcacctcccactccaacttc

SEQ ID NO: 83519 - DNA, 248 bp, Glycine max
  Clone ID: 700956712H1
ctttttcccaattttcgaatctctctcctccatggacccaacttcgctccctccccctccggccaccaccgtccccttcactgtcgaacccagcaatcacgtgacccccgccgacaacaccaacaccaaccagcctacttacgatgcgatgatatacacagcaatcggggctctgaaggagaaagatggttcgagcaagcgagccataggaaagtacatggaacaagtgtataaggaccttccaccca

SEQ ID NO: 83520 - DNA, 255 bp, Glycine max
  Clone ID: 700956714H1
atcagaaccaagaatatttacaccaagatttccatgagcaagaaatccttagcaacatccaataggcagtgattcagaatggtatgacattcctgggattgatgaactttatgctcaagtgatatctcaagatctgtcagcaaggtgacttatcctatcagatagttaaaactcattttttcaataaaggagggccgtttgtcatgtactgtaatttttatttatttatttttatgatgtgtttggaaggatcag

SEQ ID NO: 83521 - DNA, 251 bp, Glycine max
  Clone ID: 700956715H1
attgcaacacaacttcctcaagctgttggagctgcttattcccttaaaatggatgggaaaagtgcatgtgcagtcactttttgtggggatggtgccaccagtgagggagattttcatgctgctatgaattttgcagcagtaatggaggcccctgttgtttttatctgtcgtaataatggatgggcaatcagtacacctgtggaagaccaatttcgaagtgatggtattgtagttaagggtaaagcttatgg

SEQ ID NO: 83522 - DNA, 258 bp, Glycine max
  Clone ID: 700956717H1
tggagactgagaaaacagaactatacaaaatggaagatacactttctgcgttgaggtctttgatgctttctcagtctccaccgcttgatgccttagttgttccttctgaagattatcaccggagcgaatatgtgtccgcacgagacaagcgccgcgaattcgtttccggcttcactggaagtgccggcttggcacttataacaaagaatgaagcactgctgtggacggatggacgatattttttgcaggctgagcaag

SEQ ID NO: 83523 - DNA, 253 bp, Glycine max
  Clone ID: 700956718H1
accgaaacaaaaggcagagcggtacatttaaagggagaaccggtgccgtgaagcgttatcttatcactcaaatttagcttcggcaccgtctgtgtttctctcatctcagccatttcactttccctgtgatggacgccgatcctcctcaacttgatgatcatttggaacctttcagggtttctgtgaatcaaattctcaccacagtcaacaagcttgagaagcaagtgactgaggttgaacagttctatgaatc

SEQ ID NO: 83524 - DNA, 236 bp, Glycine max
  Clone ID: 700956723H1
gatggaattggaagttgacgagaacgacttgaaagccgccggcgctgaactcttcgccgaaggtggccggcgaggcattcgtatcaatggctggttgatcgagactcggaggcactccatactgaactcttccacattccaagagtgagaacagaaactcgatacgtctcatttaccagaaatggtttttggggaaaacactttgattctaaaacacttgagcagtggaaccaaca

SEQ ID NO: 83525 - DNA, 248 bp, Glycine max
  Clone ID: 700956724H1
atgaagaatttgcaaactcaaagaaatgcaactagcacttctcggacatggctgaccttaattttctgatgtgcaaggccatagagaatccaggcttgacaccatcgtcgtcgttgagaacgtcgatcatgtcggtgttcgaggacaccgtaatcgacaacggtggcaagaatcaaagggaggttggtgtggaggactacatgggatgcgcctccgtgcatggggtgggatcctctatcgccattttt

SEQ ID NO: 83526 - DNA, 249 bp, Glycine max
  Clone ID: 700956726H1
ttccaattccactgtctcgtctttataaccgccaccaaactagcatgttcttccgtgcttccctttgagatatttgatgcttggaaacgtagggaaagttgcccaatctattctcagaacccatggaagaagatatttggaagcgagtagaaatgaggcctttaactcagttggaccaaatattaagcactgcaagatgtacatgcaatataagtttccaagtgaaggacgtagttcattcttgtggca

SEQ ID NO: 83527 - DNA, 250 bp, Glycine max
  Clone ID: 700956727H1
gaaacatcgtgtgcacagtaccccagaagatcgaacaaggatctccacgaagacaaacctctgttctcaactgtgtttctttacctctcacctactttcagaccataccagattgactaggctgagaagatgcagcagacaccgcctatgattcctatgatgccttcgttcccacctacgaacataaccaccgagcagattcaaaaataccttgatgagaacaagaagctgattctggcaatattggaca

SEQ ID NO: 83528 - DNA, 128 bp, Glycine max
  Clone ID: 700956731H1
ggcttggaggttgagtccttctgtaagtgcaattccctcaccattctgtgctgctcccatttgtgtaagaactttctcttttcagttttcaacttctccctacactcgtccaaagcctctagttccta

SEQ ID NO: 83529 - DNA, 258 bp, Glycine max
  Clone ID: 700956733H1
ggtagctatttctacttcccatctcttggaatgcacaaagctgctggagcatttggtggcatcagaatttggagccggcctcaaattcctgtcccttttccttctcctgccggggacattaccatacttgctggagattggttcaagcttgaccaccgaagactgagacgactcctagagaatggtcataatctccccttccctgatggccttcttatcaatggacgtggttggaatggaaacaccttcactgttgat

SEQ ID NO: 83530 - DNA, 76 bp, Glycine max
  Clone ID: 700956734H1
aaaaagaaaaaaaaaaaagaaaaaaaaaaaaaaaaaaaagaaaaaaaaaaaaaaaaaaaaatgcaaggaaaaaaat

SEQ ID NO: 83531 - DNA, 247 bp, Glycine max
  Clone ID: 700956739H1
ggagcatacttagaaacagcaactatgtctctcatgcagcttactagctcccctgttggctcactggtccgtttcattgtaatatttgctttatggtacagaaccatggctttggccaagttgccaccaaacccttcatcagttccagcagttttagcgtttggagattccatcgtggacccaggcaacaaccacaacatgaaaacattgatcaagtgcaacttcccaccttatggaaaggattttc

SEQ ID NO: 83532 - DNA, 246 bp, Glycine max
  Clone ID: 700956740H1
gagataactagaaacagtgtgatgaaaatgaaggtccttgttttcttcgttgctacaattttggtagcatggcaatgccatgcgtacgatatgttccctctccgaatgaacactggctatggtgcccgtactccggaggtgaaatgcgcaagttggaggcttgctgtggaagcacacaacatctttggctttgagaccattcctgaagagtgcgttgaagcaacaaaggaatacatccatggcgaa

SEQ ID NO: 83533 - DNA, 249 bp, Glycine max
  Clone ID: 700956742H1
cttctcagttctctcgttagtattcttccaatctccgtcgatcaccactaacaccaccatgtcgtggctcctccgatccaccaagtcaaaactcctctcttcctcatcttcactttctagaaccttcccctctctctcacgctccggccccacacttgacctccctcagatcggagccatctctcccctccccgatctcttccaccgcaacaccgcatccatgcctttcgcgaaggaaaacgcttccgg

SEQ ID NO: 83534 - DNA, 246 bp, Glycine max
  Clone ID: 700956744H1
cggctcgagaaacgatccaaactcttttttcatttgcagcatcaaaatgagtggtagcaacgatggtagcggcagtggagctctaggtttttgaaggtggctagtgcagctgccgctacagccgccgttgccggcggtttatatgccattctttcatcctcaacctctgctagctctgagatggaagtgccgtttggcagcgcacggcgtgagagcaaagaacgtgacgatggtggctccgggtct

SEQ ID NO: 83535 - DNA, 221 bp, Glycine max
  Clone ID: 700956745H1
cgctcgccatgcttcgacacacaagagcatcagcggcaccggcatccgggcgaggtggcttcgctacggctcttgtcgctaggaagaagtctgcgaacgggtctgatgcggagttcgctgatcgtcgacagcagttcggaatcggaagggagttgcctccgatgagagactttcctcggttcctgaagtggactaagcatgtccagggtcagatgcggaag

SEQ ID NO: 83536 - DNA, 253 bp, Glycine max
  Clone ID: 700956747H1
ggaaggcatagtacacaggacagttgaagtgaatggcataaaaatgcatgttgctgagaaaggtgaaggtcccgtggtcttgttcctccacggcttcccggagctctggtactcctggcgccaccagattctggctctcagcaatctcggctattgcgccgtggctccagatctccgcggctacggagacaccgaggcaccagcttcaatcagcagctacaccatcctccacttagtttctgacatcgtcgcg

SEQ ID NO: 83537 - DNA, 67 bp, Glycine max
  Clone ID: 700956749H1
ctttctctgtcacttttttgtgtctctttctctttctttccctatcacaacaccacttcacttaaca

SEQ ID NO: 83538 - DNA, 245 bp, Glycine max
  Clone ID: 700956750H1
gcaagaggttattcttggcaccaagctttccattctcatccctgctattccagctgccatcgttgccgagtgctttggctttggaagaccttggatttttatattaagcttacttggacttacaccacttgctgaacgtgtgagcttcattacagaacaagttgccttttacactggtcccacagttggaggacttctgaatgctacatgtgggaatgttactgagctcataatagcaatatttg

SEQ ID NO: 83539 - DNA, 69 bp, Glycine max
  Clone ID: 700956751H1
ctttaacgttcacaacggaggtagcatccagcttcctcggcctcgcttatcactatcccaaacccttca

SEQ ID NO: 83540 - DNA, 246 bp, Glycine max
  unsure (1)..(246): unsure at all n locations
  Clone ID: 700956752H1
cttcggttagaccttgctggccgtgatttaacagagtacttggtgaaaatccttaccgagagaggatactccttcagcacctctgccgacaaggcaattgtccgtgctgtgaaggagaaattgggatacgtggcccttgatttcgagcaagacatggagactactaattgtagntctgcagtgganaagtctaangaanngnctgatggacaggtcattacaataggatctgagagattccgttgt

SEQ ID NO: 83541 - DNA, 246 bp, Glycine max
  Clone ID: 700956755H1
acagaaattaagctagagctacatagtttttttcttttctcaccttccttctctcccttcagacaagggacgaaaaatcagagagagagagagagagagagagagaaattccaaaactctgtcgtctcacagtcatctaagttttcccttaggggctctaggtaacatcgcctccttcgtgtgctttctggcaccactaccgacattttatagagtttgtaagaagaaatcaaccgaagggttcca

SEQ ID NO: 83542 - DNA, 245 bp, Glycine max
  Clone ID: 700956758H1
gtcggagactacgggttcgatccgcgtgggctagggaagcccgcggagtacctgcagttcgagctggactcgctggaccagaaccttgcgaagaacgtggctggggacatcattggaaccaggaccgagctcgcggacgtgaagtccacgccgtttcagccctacagcgaggtgtttgggctccacaggttccgtgagtgcgaactcatccatggaaggtgggccatgctcgccactctcggagc

SEQ ID NO: 83543 - DNA, 66 bp, Glycine max
  Clone ID: 700956762H1
accaccgccgccgcagccaccgtggatttcacccatcaccaccactctcaccccgcaaccccacca

SEQ ID NO: 83544 - DNA, 253 bp, Glycine max
  Clone ID: 700956763H1
gtgctccactacgcctacggccacgtcaagaaagccatcgaggcctacgtggtgcgcgccggaggaccgttatcgaagtccccctccccttccccgtcacctccaacgacgacgtagtcaccgaattccgaaaagcccttgagcggggcaagtcccgaggcaacagaattcgcttagcggttatcgaccacgtgacttccatgcccagcgtggtcatccccgttaaggacttggttaaaatctgcagagaggg

SEQ ID NO: 83545 - DNA, 256 bp, Glycine max
  Clone ID: 700956764H1
caccttccctctcttctgttaccaatggctccctcatcaaactacatttctttccttttcctcaccacccttttgatagctcttcaaatcagtgcaagagacagccagttcttcagcaaagtcacccattttgacaaaaacagtgtcaaagagacagaacttcccaacaaagaagcaccagaagtgaacaagccagagcaacaaccacctttcattccggagactgaaaacagctatggcctatatggtcatcatg

SEQ ID NO: 83546 - DNA, 258 bp, Glycine max
  Clone ID: 700956765H1
aaatgcccttgacaattcttctctaaactcggaagcaaaacaaaaagccatagctatgagtggtgaagcgcgatcctgtgactactgtggccactccacagcacttctttactgcagagccgattcagccaaactctgtttctcgtgcgatcgcgaggttcactccaccaaccagctcttctcgaaacacacgcgcacgctgctctgcgacgcatgcgatcattcccctgccaccatactctgttccaccgacacctc

SEQ ID NO: 83547 - DNA, 253 bp, Glycine max
  Clone ID: 700956771H1
gaacatctttgcttgctggtccaactcctgttgtggctgaaatcaaccatgctattggagctgaaggagttctcagtgtagaatgtaaggaagttgtttctcaatatggagagttgatatgggatctcttggtatcaggggtgaagcctgattacatatgttcacaagttggtttatgttcttccaaaaggcatgaatctaagagtgctggaattgaaatggtgactgaaaaggagcagggagagttgacggc

SEQ ID NO: 83548 - DNA, 221 bp, Glycine max
  Clone ID: 700956772H1
tggagaaatcaattgggatgaccagatcttgttcaatgggatcatattttatataggttatatgttagttccagagagttctcacattaacttgtggagaacagatggtgtacttatcactgctcttatacatgctggaccagtggagtttctttattactggttacatagggcacttcatcaccacttcctctattcccgctatcattctcatcaccatt

SEQ ID NO: 83549 - DNA, 247 bp, Glycine max
  Clone ID: 700956773H1
cccagagtggtgtagaagacaagatttcccagtcggtttcgttcaaggaggagaccaacgtggttggcgacctccccgaggcgcagaagaaagcccttgatgagctcaagacgcttgttcaagaagcgctcaacaaccatgagctaactgctcccaagccagaaccggagaagacgaaaccagcagcagagaagaaggaggaagttgaagtgacagaagggaagaaggaagctgaagtcatagaaga

SEQ ID NO: 83550 - DNA, 244 bp, Glycine max
  Clone ID: 700956774H1
caataaaccacctccgcgcgagcaccttacccagtgaaccctaccgcaccgaaacaaaaccctcgcaaaccctaaacctaatctcataggaacatggacggcgacgacgagacctcgggtccgatgatcgacgaaatctacgccaacggcggtggcgtcggcgacgacggagacaagcggagccgccgcgcaatcatgagcggcgaccagctcgacatcgaggcgtacgcggcgctatactcgg

SEQ ID NO: 83551 - DNA, 243 bp, Glycine max
  Clone ID: 700956775H1
cagaatagtagtacccatggtgaattatgagtttgatacatcaactggatcattgaaaatattaaatggtaatgagcattttgtgtctaatttatccttgctgttgcgttggtcaccatattcatcagaagcagatcttctgaaacaagtcagttttctatattttccctttcatccatgataatttgctggctttgttagaatatacttaatggttggcatatttattctttcccccccatt

SEQ ID NO: 83552 - DNA, 234 bp, Glycine max
  Clone ID: 700956776H1
gttggactcctcgtagcttgaggtgccgcgctgtgacgtggcgccgtccatgagagcgggtggtggggctggccctggtggactccgctttgttgtgagcggatctggagcggcgccgacgcaccgtccagtggaggttgaggcagggcggcggaggcggagagcggtgtaggcggatgagaaggtctacgaccagggagtcgtctgccatggcgaccttgacccagtgatcgt

SEQ ID NO: 83553 - DNA, 245 bp, Glycine max
  Clone ID: 700956777H1
acaaagagttggtatcggattgtttcaagtgttgcaccgaagactccaacgatgccactaccaaggttacttactctggagctgtgttggaagtctgcatgaggaaacttgttttctatcctgaagttgtaagctttattgaagatgaaaaagatcaatttccatcagttaaagttcaatatgtttttaactctccaccaaagctaattatgctggatgatgcgggtcagcaaaaagaaacaatc

SEQ ID NO: 83554 - DNA, 247 bp, Glycine max
  Clone ID: 700956778H1
gccgttgtcaagaagtatgacattctttttattgcagatgaggtaatatgtgcctttggaaggcttgggataatgtttgactgtgacaagtacaacattaagccagaccttgtatccctggctaaggcactatcttctgcatatttgccaattggagctgtccttgtaagcccggaaatatcagaagttatacatgatcaaagcaacaaactaggttcattttctcatggttttacttattctggac

SEQ ID NO: 83555 - DNA, 253 bp, Glycine max
  Clone ID: 700956780H1
tgaattacaagtgaactacaataatgaccgttcaagggacttcacaaacccaaatctccccacagagcagaaaggcagaccttcacaacctggatatggtgatgcaggaaacatgtatgctgcccagggttcaggagccagggcagttggatttccacagatggcaaatgccgcagccattgcagctgcctttgggggaggtctgcctcctggaataactgggacaaatgacaggtgtacagttcttgtatca

SEQ ID NO: 83556 - DNA, 276 bp, Glycine max
  Clone ID: 700956781H1
tcggctcgagtgcaattccaaatctctcttctttctcagccaagcatttccccctttttcgtttcgaatctccccttagatcacaccgatttcgccttcttctttctctttaaactttaggctcgctagggttagggttagggttagggttaggttttcggtgaggcgagagagtatgaggttgagggaggacttgccgtgtaaaaacgatgacgtttgtgagaaagaggaagtgatgatagagaatgatgtaaccgtggcccaaaatcattggtg

SEQ ID NO: 83557 - DNA, 266 bp, Glycine max
  unsure (1)..(266): unsure at all n locations
  Clone ID: 700956782H1
gggcgttcagtgttcaccacagtttacacacgagtacccattttctcttctcaatttctcagagtgtgcagagaaaatcatggtggacgcagcagaacgtaggtacttggaggatgacgattcatcactcatgaaaactattaagggggcaacaactggtttagttgctggcactatctgggggaccgtagttgccacctggtatgatgtccctcgtgtagagagaaattgttgctcttccacgggctnngagttaggactttcaa

SEQ ID NO: 83558 - DNA, 259 bp, Glycine max
  Clone ID: 700956783H1
gaactactttcacttcttcaaaatggctcactcgttgattagaaaatgcataaaacctgcaaccctcaacttcctgacaccactcgcagcccctgagattcggcggcggctagcgtcggtggcggcagctgcggacgaggaccctccgcaatcgccgtcgtcgttcactttctcgtcggagggggagaaggtgtacgtgaagccgccggcggggaagtggaagccgtcgccgtcgtcgacggttacgatgccgatgtcg

SEQ ID NO: 83559 - DNA, 256 bp, Glycine max
  Clone ID: 700956784H1
gtggcactgcagaaatacttcaactttgagatattgcatgctcggtgggctatgcttgcatccgtcggtgctctgattcctgaaatattagacctattgggagcctttcactttgtagaaccagtgtggtggcgtgttggatattgcaaagctcaagggagatactctagattaccttggtatccaaggtcttcactttgctggaagtcagggagtggtcgtgattgctatttgccaagcactccttatggttgga

SEQ ID NO: 83560 - DNA, 255 bp, Glycine max
  Clone ID: 700956785H1
aagaaaatataccccagagagaagaggagggggcttttattccgttaatttgcccctttggtgacgcgttgtatttcttagccgcttcttcaaccagctctgtgcttccttcttctaccgtctccatttccatttccgcctgcaacattcattcagagctaggttcagtttccgccattgatcaatgctccctactctctgtttccaggttccaacctcgatcttgtatctcccccttgcctttcgtacgatcct

SEQ ID NO: 83561 - DNA, 250 bp, Glycine max; identical to SEQ ID NO: 66864
  Clone ID: 700956786H1

SEQ ID NO: 83562 - DNA, 239 bp, Glycine max
  Clone ID: 700956791H1
gagagcttcctttgatggattcttgcttgtattgcttgctggaggtccctcacgtgcttttacccggaaggactctcagatcatagaggatgatttcaaatttctcaaggagttgttttgggcaaatggggatggcttgccttctgaactaatagataaattttcaactactgcaaggtctatccttcccctcttcagaaccgacacagagaccctcattgagcagttcagacggttga

SEQ ID NO: 83563 - DNA, 244 bp, Glycine max
  Clone ID: 700956793H1
gtgaatgctaatgtctcattgaccttgggtatggagctaattagtagaagaacaaatgtggataatgtatcaggacttactgctactccatcaagacctggtaatatttctggtgagggaggacttggtttaccttcattagagggtgctgattctacaagaccagttacatccacaaatggggccatcaatgaggacactaaagttcacagatatcatgaagaagttggacacttcaaaagtg

SEQ ID NO: 83564 - DNA, 246 bp, Glycine max
  Clone ID: 700956794H1
aagtgaaagaaatatttctgatgagagtaatgatgtgccaagctgactatctgaactggttctgggtgcagagatgctagactctccaggggaagttgctagcagagaatgaggttcttgtaaatgaatttcttcacgagcatcactatagtgttactgatgaatttgatgtctctgatcacattcaaaacagtgttgaggggaaaataaagcagacaatggagaaggccttttgggatggtatca

SEQ ID NO: 83565 - DNA, 249 bp, Glycine max
  Clone ID: 700956795H1
aaaaaagaatctgagacacctgtgtcctagagctaaaaactttttcttttgtgtatatattatataagccgagaaccgtagggagtatttaaggagtaatccaagggagaaagtgatgtgaaattccatcagacttgtgtccataatctgtccctgtgatttactttttggagtcaatggaaatatagatcaaggtggcaactgtagttcttggtgtttctgctaaaaaaaaaaaaaaagggggggcgg

SEQ ID NO: 83566 - DNA, 251 bp, Glycine max
  Clone ID: 700956796H1
gggagaagggaaggtgagtagtaatggtcatggatgttgcaaatcagggccaggctatgcttccccactggcagccatttctggtcccagagagtctctcatttatgtaacctctgtctacacagggaccggaatagagaagccagactatttggcgacagtggatgtggatccaaactctccaacttattccaaagtcatccataggcttcctgttccttatttaggtgacgaattgcatcacacaggct

SEQ ID NO: 83567 - DNA, 90 bp, Glycine max
  Clone ID: 700956801H1
ggccggtaacgtcacacaaacccaaaatcacaatggcgttctcatcgtccctatggtcttccctcttcgttgcaaacccaaacagaaccg

SEQ ID NO: 83568 - DNA, 263 bp, Glycine max
  Clone ID: 700956804H1
cgctattatccccagacgccaccgccgcagcaccagaagaagaagaagagtgatggctgagtacgacctaactccgcggatggcgccgaatctcgacaggcaccttgtgttccctctcctggagttcctgcaggagcggcagctctacgacgacgaccacatcctgaaggcgaagatcgaccttctcaacaacaccaacatggttgactacgctatggacatccacaagagcctctaccacaccgaggacgtcccgaacgata

SEQ ID NO: 83569 - DNA, 260 bp, Glycine max
  Clone ID: 700956805H1
ttactatcttgcctctcttcttctgctactgctgctcaacccacacaccaccctgggagcgcagaacctcatgctaccctaccataacggcgccctcctcaaaggaaccattaccgttaacctcttatggtacggcagcttcaccccaatccaacgctccataatcctcgacttcattaactcgttaagttccaccgcgggggcaccacttccctccgtagcatcgtggtggaagaccacggacaagtacagggggggat

SEQ ID NO: 83570 - DNA, 264 bp, Glycine max
  unsure (1)..(264): unsure at all n locations
  Clone ID: 700956807H1
gttcactcttcttctcttgcggctagggttttagcgcacntcttctagatttaaggaagatgggtaaggaaaaggttcacatcagtattgtggttattggccatgttgactctgggaagtccactaccactggccacgcgatctacaagcttggaggcattgacaagcgtgttattgagagatttgagaaggaagctgctgagatgaacaagaggtctttcaagtatgcctgggtgcttgataagcttaaggctgagcgtgaaa

SEQ ID NO: 83571 - DNA, 262 bp, Glycine max
  Clone ID: 700956808H1
attcaaagacattgttggaagtgcatattacattgctcctgaggtcttgaagaggaaatatgggccagaagttgacatatggagtgttggtgtcatgctatacattcttctaagtggtgtccctccgttttgggcagaatccgaacatggtatattcaatgccatcttaagaggtcacattgattttacaagcgatccatggccttcaatatccaatgcagcaaaggatcttgtaaggaaaatgttgactacagaccccaaa

SEQ ID NO: 83572 - DNA, 262 bp, Glycine max
  Clone ID: 700956809H1
tcttggtcctttctctaatccaaatatctctccgttaatgctctcaccacaaacttcaatagactagccaaaagctaacaccaactataggccaaatcaccaataaatattatttcccgttcttttggcgtgttggccacccactgaacacatttgcactcacacatagaaacacagagaggccattggttggtttcagagatgggaagcatgcacatagaaaccccagaaacttttgctgatggtagcaaaaacttcgatg

SEQ ID NO: 83573 - DNA, 220 bp, Glycine max
  Clone ID: 700956810H1
acgctcgtcccaaatccaggtgcaacaggaataccacagttgtacacggcgacgaagatgagatttatcctccacaatcacggcggccagtgcggcaaccagatcgctacgacgaactgggacctcatctgcgatgatcacggcatcgaacacaccggacagtacagcggcgactccgaactccaatatcaacgcgtgaatgtctactacaacgaggcca

SEQ ID NO: 83574 - DNA, 263 bp, Glycine max
  Clone ID: 700956811H1
cacatccatcactctgcatgtcttgttgtatctataaattaaattccttacatcatgccttgccacagtgattcactctaagagctgagacaacaagtcccttcccttctcttcttcttcttctccaaaggcaaaggtctttgagatggaagtcttaaacccgattgaaggcaagacctacaagctcccagttggatacagatttgatccaagtgatgaaattcttgctggttactatctcaggaagaggatcatggcccaac

SEQ ID NO: 83575 - DNA, 260 bp, Glycine max
  unsure (1)..(260): unsure at all n locations
  Clone ID: 700956812H1
gaagggtctcgntgtgtctaatgataattacaccgcttctctggcgaggaaacagaacaaccttgaaggatcacgctaaggggaacgatgaatcgatggagtctctgatgaagtgtgatttttttgatggagagtgggttaaggatgatgcatatcctctctataagccagattcttgctctttgattgatgaacagttcaattgtattaggaatctaangcctgataaggattatcagaaatatatgtggaagccaaag

SEQ ID NO: 83576 - DNA, 88 bp, Glycine max
  Clone ID: 700956813H1
caacattgtggtgaatcggtggtaaggtaacaaaaaacaaaaggcgcggctgtgttgtgtgttcctgtttaatttaacctcgaaagga

SEQ ID NO: 83577 - DNA, 267 bp, Glycine max
  Clone ID: 700956815H1
gttctccaatactgagcttgggctattaaatatgcaagtgcctgaagcatctggctccatgctcagacaatacaaaagtagtgtggacaatgctaaggatccgattgtgaattcagtttcatttcctacaccattgactaatactctttccatggagctctctgaagattgcagaacatccatgaacagaaaccatactcttatgactgcttcaactgatttgtctaatgctagatgaaacaatgtttacctgaatacaagcactgt

SEQ ID NO: 83578 - DNA, 269 bp, Glycine max
  Clone ID: 700956816H1
ttactatcttgcctctcttcttctgctactgctgctcaacccacacaccaccctgggagcgcagaacctcatgctaccctaccataacggcgccctcctcaaaggaaccattaccgttaacctcttatggtacggcagcttcaccccaatccaacgctccataatcctcgacttcattaactcgttaagttccaccgcgggggccccacttccctccgtagcatcgtggtggaagaccacggacaagtacagggggggatccactacaa

SEQ ID NO: 83579 - DNA, 286 bp, Glycine max
  Clone ID: 700956817H1
gcgtacgtttcctctcgatgcttgtaagaatttctggtattgtgatacgttgttcagatgttaaaccattgatgaaagtggctgtatacacatgcgaggattgtggatttgaaatttaccaggaagtaactgctcgggtcttcatgcccttgtttgaatgcccatcaaagcgctgtgatacaaacagaagaaaggggaatgttatccttcaactaagagcatcaaaatttttgagatttcaagaggccaaaattcaagaattagctgaacatgtccccaaaggcca

SEQ ID NO: 83580 - DNA, 266 bp, Glycine max
  Clone ID: 700956818H1
tcaaaatgtcctccatggcttcctccaccgctttcttcacacccctccatgatttcactcaagccagaacaaccccatcaccccctttgcctttcatcaaatcctcctttgcttcctccaagtcaaccttttttcaccctgccctttgcctacaaacctcttccaactttcccaggctttttggaaagcctaagtttttctctgttcatgcaagggctgccacagaaaaaaccatttatgattttactgtcaaggatattgacaga

SEQ ID NO: 83581 - DNA, 263 bp, Glycine max
  Clone ID: 700956820H1
gttatctagtgagtgtggtggcacttctggtgttgctcaacaatggcgtcgcgttgcagttatggctacaagcagcgacagcaggtggtctatggcttccttgcgctctgctttgccctctcattctcctcctgtttcctcttcattgcgcttccctgtattgccatcttcaccgtcttcttcttcaacgaaactccgaatttctcgaagcaaaaccctaatccctctttcttcctcttcctcagtagtgcgattttcgattc

SEQ ID NO: 83582 - DNA, 261 bp, Glycine max
  Clone ID: 700956821H1
gcagaaagcaagctcatcctagagttttaaaaatggcagcagcctcctccatggctctctcttccccatccttggctggcgaggccgtgaagctgggcccatcagcccccgaagtcgggagggtcagcatgaggaagaccgtcaccaagcaggcctcctccggaagcccatggtacggcccagaccgcgtcaagtacttgggcccattctctggcgagcccccgtcctacctcactggcgagttcccaggtgactacggct

SEQ ID NO: 83583 - DNA, 258 bp, Glycine max
  Clone ID: 700956822H1
aaggccgttgcgaaactaggatacctcctttctgtgacaatggttctaaacagtgttcaaccagtggtttcaggtgttgctattggaggtgggtggcaagccctggtggcctacatcaacataggttgttattacttatttgggcttccactggggttcgttcttggttatacagcaaatttgggggttgagggactttggggtggtatgatatgtggaattgttctccagaccttgctgctcttgttgatactttac

SEQ ID NO: 83584 - DNA, 259 bp, Glycine max
  Clone ID: 700956823H1
cagacagaggcatgtgggaatctgttgtgttgacggtagctgccaccgccggcaacaacatcggaaagatccttcagaagaagggcactatcattcttccacctctctctttcaaactcaaggtcataaggtcttatgctttaaacaaaacctgggtggtaggttttctaatggatatattaggggcattattgatgttaagggcattgtctctggctccagtgtctgtcatccaaccagtttctggctgtggactagc

SEQ ID NO: 83585 - DNA, 258 bp, Glycine max
  Clone ID: 700956824H1
cgtttgcgtaatcagcagctaccttccttccttccttctctcttcctcctaccataccacgggtcggaaggtttctttcatggatgatggtccttgggaaataaaggttattcgtgatcacttttgatttccaacatctggtgtagaatctcttgaggacggaacgccttctattacaaaacctggaactgctaaattctttgagggaggtattgcatcctggtggaaaaggggaaagaaaccaatgatcagaaagtc

SEQ ID NO: 83586 - DNA, 260 bp, Glycine max
  Clone ID: 700956825H1
gaaaaaccccactctctgaagtaaccaacgcaacccatcactctttctttcttcctcttccccccacatactaatatctcaaatctagggtttcctctgcgtctagggtttcttccttctgcaaccatcaatggcggcaatcacagctccccagcaccgatcctcgaagacggagtcctacgttgacaacaagcgcaaggatgacatccgccacgccaacatcgtggccgcacgctccgtcgccaacgcggttcgcacca

SEQ ID NO: 83587 - DNA, 260 bp, Glycine max
  Clone ID: 700956826H1
tcacttcaaaccatcccaaaaggccatcatcaccgatttcgttacctcactgtcatccccatcgtctcagagcagccagccatctgttgccacgtggaaaaccacggagaagtactaccacctgagtcccaagaacaagaaggctgcttcttctctttctctatcactgggcgatcagtttctcgacgagggtttctcgctggggaagtcactaaccagcaagaacctcgtcgagctggcatccaaagggggacagagga

SEQ ID NO: 83588 - DNA, 263 bp, Glycine max
  Clone ID: 700956830H1
ggaggttgcaatggacactagtattagtattagttaaagaaaaccccattgcattccatttggcaactattcctatccaattttaaatgctcttccacctcacgagatctccgtggccctagcctaccactactcacttcttcaatgtcctactcctcttcgatatgagtcaactcggcgccgtgttgcggactcagagggagcccaggaggagtaccattctgggtttgttgacggagcaaatggacggcgttgatagtggg

SEQ ID NO: 83589 - DNA, 257 bp, Glycine max
  Clone ID: 700956832H1
gggttgtgaaagcagagaagtgagatacactaagttatcctcataaatacactctaattaggtggcaagataagtgtctaaccttagtaacattgccacatattgtgttcattctggaattgtgccactaaaattctattcaattcatctatggctgcctcttcttatgctatgcaatcaatcctggcaaaccctttgatccgcatttccagcgggtctagggtgaaccaatttggcgttcctgctttgcacatgag

SEQ ID NO: 83590 - DNA, 260 bp, Glycine max
  Clone ID: 700956833H1
caattgcgatgaaggactcaacatcttgacaccaccccatttcctaagtttgctcctttctctgctccttcttattggttttcatttttgtcttctggggttccctttgttcttttcacgtgtgatgtgttcatgattcatagctccacattttgcatctattaatcagtcatgtcagttgatttggattagtcgtgttggacctggatgctgctgctaatacagttgatccacaaatgagattccgtattgcattgttt

SEQ ID NO: 83591 - DNA, 259 bp, Glycine max
  Clone ID: 700956837H1
ctcgagccgaatcggctcgagatgtttgcaagattctctgattgctgagaaagtttcagggaaaattgttatatgtgagacgaggtgggaatccgagagtggaaaagggtttggtggttaagcttgctggaggtgctggaatgatattggcgaatagtgaagcctacggagaagagttagttgctgactctcatcttcttcctgctgcgtctttgggacaaaaatcaagcgagattttgaagaactatgtttcatcttc

SEQ ID NO: 83592 - DNA, 90 bp, Glycine max
  Clone ID: 700956838H1
cggttacacgttaggttagtgagtggctgtcgtccccaaacccccccactaccttaaaccaaacgatcacatcccctcaaaacaaaacca

SEQ ID NO: 83593 - DNA, 249 bp, Glycine max
  Clone ID: 700956839H1
gcgaggtgaaatattagggtggaatccatgacttgccggggttaccagctggagtgaagtttgacccagatgaccaagaaatattaggacatttggaggcaaaagtggcgtctgatgaatgcaagcttcatccccttattgaagagttcataccattcgcttgaaggcgaaaatgggatctgttatacacacccataaaagctaccaagtgttagctcagatagacagatccgccacttcagtcacagg

SEQ ID NO: 83594 - DNA, 255 bp, Glycine max
  unsure (1)..(255): unsure at all n locations
  Clone ID: 700956841H1
gatttgatcagcagatagagattgaacatttgcagcgaaaaggganagatagagaaaatcatgtcaacagcagaagctcctccttctttccaagaagcagcgcgatgcgttgtctgcaattgcagtttcaacactttcagaagaaggcaccactgtcgatcctgtgggagaacattgtgtaatgaacattcatcaaatcaaatggctttaccacaatttggcctttactcaaatgtccgagtatgtgctgattgt

SEQ ID NO: 83595 - DNA, 253 bp, Glycine max
  Clone ID: 700956842H1
aatttttcatatcaggtctagcaggggatgacataatactcaactgtgttttggaagcactatacaggcgtattttgcaagcccacaaagatcagaaagattttagagttataattgtgatgcccctcttgcctggtttccagggtggtctggatgatggtggtgctgctactgtaagagccttaacacactggcagtatcgaacaatttctagagataatcactccatattagacaatcttgaagctatact

SEQ ID NO: 83596 - DNA, 259 bp, Glycine max
  Clone ID: 700956846H1
ttctctttttctctctctacactctattcaaccgttcacattttctctcttctttatcttagattacttttccatggaggaaagcaagaaacgagtccgggacgagtccagctactcacccgagtcccaaactcagctggtcgactctcccgagtctgaaagtcagcgggtcgactcacctgagtctaagattcgtcgagttgactcgtccgagtctcaactcgactcggtccttgactcggaggtgcgtctacaagac

SEQ ID NO: 83597 - DNA, 260 bp, Glycine max
  Clone ID: 700956848H1
tggagattcattggtggtgtccactgaccttcaatccgataaacaggaggacgatcagtccgaggattcatcagattctggtgttcagctatccaatgaacagcagatggagcatgaggtgtaaggggatttgttggatgccagtgaccagcagcaacttgaagatcaggaagaacatcatggtggggattcatcagattccagttctctgttgccctgcattaactgggacaactcaattgcttgtctcagccactgtt

SEQ ID NO: 83598 - DNA, 261 bp, Glycine max
  Clone ID: 700956849H1
atctgaattagggtttcttttccccttttggcaatgatgaacggaggaggaagacgacgaatcgtgctgataactggagtcggaaaaggactcggaagagccctggctcttgaactcgcccatcgtggtcacactataattggctgctcccgttctcaagataacctcaattccctccaatcccaactctctttttcttcttccaaccatttgttactcaacgccgacgtgagctccaatgagaacgttcaagaaatggcc

SEQ ID NO: 83599 - DNA, 256 bp, Glycine max
  Clone ID: 700956852H1
ctatatttggccatgcaagtcttgataattctaatgagctttggtcctctaaagatgtgagtaaaaatgcagcacctttaccattggacacaccaagttcatcaggtgctttaaggaacagaactgagcctttggaaatcaaagatgaatatgctcaatgtagtgatgaatcattggaactcaacaatgagaagattgggggtcctgcatcccaggttatagaaaatgcatgcacaatcacagctatagtgggaaa

SEQ ID NO: 83600 - DNA, 256 bp, Glycine max
  Clone ID: 700956856H1
cgcaaaactgcaaactctaatcctccgtcaagacaagcctcaactagaggataatgctgttgagactattgcaaaatgctgttatgaactgcagatcctggacctcagcaaaagtttcaagctaactgatcgttcactctatgagctcgcccttggttgtcgcgatcttacaaaactcaacatcagcgggtgttcagcatttagtgacaatgctctggcttaccttgccagcttctgcagaaaactgaaagttcta

SEQ ID NO: 83601 - DNA, 254 bp, Glycine max
  Clone ID: 700956857H1
gtcctttctctgtcctctctctctctctatctgcgaatttaaactccaatttccatttccattgataggaaggaggaaggaacgaagcggaagcgcaagcgaaatcgctttgtctctatattgagccactttgaatctgtcgccgcaacggtagatcaaatcgagtttcacctgaatgctctttctggatgcgatttaggttgttgaaggaaacaacaagtgaaaacatgattcttctcaaagacattgtgcct

SEQ ID NO: 83602 - DNA, 254 bp, Glycine max
  Clone ID: 700956858H1
cggtggactctcggatgatgagattgaaaagatggtcaaagaagcagaattgcatgctcagaaagaccaagagagaaaggctctcattgacattagagacagtgctgacactaccatctatagcattgagaagagtttaggtgaatacagagagaagattcccagtgaagtggccaaagaaattgaggatgcagtttcggatttgagacaggcgatgtcaggggataatgttgatgaaatcaagtcaaagcttg

SEQ ID NO: 83603 - DNA, 254 bp, Glycine max
  Clone ID: 700956859H1
agagaatccaaaagtctctcaaaaaataaccatgatgatgcatgtcctttgcttctcagtgttcctagcagcagcaatgcaaggaacactggcggttgaatacagtgtcaccaacaacgccctctcaacccctggtggtgttcgtttccgtgatgcaataggggacgaatacgccaaacaaacacttgactcagccacccaatgcatatggggggtcttccagcaaaacgctcctgctgatagaaaagatatac

SEQ ID NO: 83604 - DNA, 256 bp, Glycine max
  Clone ID: 700956861H1
gagattggatcacatatactatctgattctagggttaaattttaattcactctactctcttactctctcgctcacgcctcacacgttttctgtctcttgctcactctactcagttcccttcccaatcgccgctcagccatcaccgtcgccactcacggggagactcgccctcctcgaccgacgttccctccacatccttcaacaaagtttccggcgtctgttcgagcatgtgaatcataggaagaggaggcgaatt

SEQ ID NO: 83605 - DNA, 260 bp, Glycine max
  Clone ID: 700956865H1
ctcaacttcttttcaattctcgcatttcggaatcagatatggaagaacccgtcatggaaccacaaccctccgctgctgcttcctctgggaacaccaccagactcaggcttcagaagtatgcgctccgatctgtcaataaatcgaaggaagacaagtcagaaactcccaattgctccaatcctacttctgaaaccaagagggggagaagtgtaggtgcttcaagtgtaagtaaaagtgtgagtgttcttgatttttctggc

SEQ ID NO: 83606 - DNA, 256 bp, Glycine max
  Clone ID: 700956866H1
gccaacaacgtgatcaagggcacaaagcaagagcaagttcagcaaatcatcgaagacatcaaggcgtttaaggaagccaccaaagtggacaaggtggttgtcctgtggactgccaacacagagaggtatagcaatttggttgtaggccttaatgacaccatggagaatctcttggctgctgtggacagaaatgaggctgagatttctccttccaccttgtatgctattgcctgtgtgatggaaaatgttcctttca

SEQ ID NO: 83607 - DNA, 110 bp, Glycine max
  Clone ID: 700956869H1
gaaaataaagacttcctttctttctatgttttcctctaatgtattagtcctcttgaaaacaaaaagtgtaaaacgcatatttaaatatgatggtgtacaagttgctcact

SEQ ID NO: 83608 - DNA, 75 bp, Glycine max
  Clone ID: 700956871H1
gtccgtagcgtaagagaggtagcttaaaaccctttcgctgcgcgtcaacccatcctaaaaccttatctctaagtt

SEQ ID NO: 83609 - DNA, 253 bp, Glycine max
  Clone ID: 700956873H1
ggaatcattaattctttccgttccagtagtagcagtttagtttatttcctcaactcaaactaaaatgctcaaaatgggactcaaaaacctgttcttcttcaaaacatcaccttcgccaccttcctcttctcccacaagaaccttctcctattcactaatggacgaaaacatcgaaaccgctcgctccatcatttccaaatgggaacttatttccccttcttaccaaaccgcccctctattcagcaacacacgc

SEQ ID NO: 83610 - DNA, 63 bp, Glycine max
  Clone ID: 700956879H1
gcataatcccttctggaccagctgagatatctgaccaacgaaagcagctgaaggccatcattg

SEQ ID NO: 83611 - DNA, 273 bp, Glycine max
  unsure (1)..(273): unsure at all n locations
  Clone ID: 700956881H1
gtcttatctcggatctacgcaatgcactgtgtatctgtaataagaacagggttcccatttcgcaaccatcggacctacnnactcttgttctcaagggatacgantttctctgcactcacttctagggtttcctctgcgctatcagcaatcatggccgacgaaacaccaaatgagatgaaggaggaggttccagaaattgttcctatctctcctaccaagaagaagaagaagaagaagattacaattgtagatcctgctgatgaccctgtggag

SEQ ID NO: 83612 - DNA, 126 bp, Glycine max
  Clone ID: 700956882H1
ctattctttctctgaaaaccaaaacaagaggaattaaagttcattcatgtaaaaaagaaagtaaagataaaaataacatgcacaacaacatgagcactctctctttcttcatccttctttcaacac

SEQ ID NO: 83613 - DNA, 252 bp, Glycine max
  Clone ID: 700956883H1
aagcaagctcatcctagagttttaaaaatgagagcagcctcctccatggctctctcttccccatccttggctggcaaggccgtgaagctgggcccatcagcccccgaagtcgggagggtcagcatgaggaagaccgtcaccaagcaggcctcctccggaagcccatggtacggcccagaccgcgtcaagtacttgggcccattctctggcgagcccccgtcctacctcactggcgagttcccaggtgactac

SEQ ID NO: 83614 - DNA, 123 bp, Glycine max
  Clone ID: 700956884H1
atcgagccgaatcggctcgagccaaactcaaccgacttttgacgtagcttccttctccctcgttccctctctctctctctcgctctccgtgttatttaatctatttcgtgttaacgaccacat

SEQ ID NO: 83615 - DNA, 262 bp, Glycine max
  Clone ID: 700956886H1
aggaaccaaatgtttctagaaattgctgtgagaatagcgatgcaacagctgaagcgaaccatgtagagaaagaaacttctgcctatagaaatttttctgatgggctgtacggcacttcagataatggacagttgggtggtgaggaacatacattggtttcaccgaaatcctccccagagatggccgtaaatggatcttaagattttcaaaccatacagaggaaggcagattgtttgtgttatttgacctatggatttgttgg

SEQ ID NO: 83616 - DNA, 249 bp, Glycine max
  Clone ID: 700956889H1
attagcagaaagttcaaaaccccacagagctgttttcaaataaattctgttctttttatcccattcaagtcaacttaacacaaaaaggtttagtctttggaattggggttctgggatttttctatatatgaattgaagtggagatgatattggtgtagttggtgagatgaagggtgttctttccatcagtttcttgttttgttgtgtgctgctgcttttggattcttcaatttcacttcctctatgtgt

SEQ ID NO: 83617 - DNA, 253 bp, Glycine max
  Clone ID: 700956892H1
ccggaattgaatagaaatagaatcgtcgattttctctttctctgactctagggtttcattattttcttctgtagatccatctatctagcttcggagctgcaaatggacgtcgcagtcactgccttccggtcaccgctgatcatcctccgaagaccggtcaacgagtctgcctcagctcggttcggttccacttttgggttttccagaaagcaacggttagattcagtatgtatccccaaacacaagcacaagc

SEQ ID NO: 83618 - DNA, 251 bp, Glycine max
  Clone ID: 700956893H1
ctcgagccgctcgagccgttggttttaattggtataggcgtgccaaggtcttgttaattttgagtgttaagtgctgcaactaatcagatcccaagaccttggcctaccttgccatacagaaaaaaaaaaagcaaaaaaaaagccaaggtttggagccaacaaaaataaacacaaagcacaagtcatggaaagaataatggttggaagtgcaacaaaggttgctttcaccctcttggccactttcgccattg

SEQ ID NO: 83619 - DNA, 250 bp, Glycine max
  Clone ID: 700956894H1
tgccttatctgctgttctagtttattggcattgggatcagtaactgcaattcccaatgcaaattttcatcgggcgccaaggagcactagtgtgcttctggttgttgtctgtgttttttgtggtaacaggattcaacaatgaagagcacaggacagtggaggtagttggcctaggagaatgcgcagactgcaggcagaacaatattaagaataaccacgctttctcagggttacgtgtgacggtagattgc

SEQ ID NO: 83620 - DNA, 257 bp, Glycine max
  Clone ID: 700956895H1
acaaaaacaaagaagaaaaaaaacccttagccaacacaaccatcatggccacctctgctattcagcaatcagcattcactggtcaaactgctctgaagcagctcaatgagttcgtccgcaagaccggtggcgccggcaaaggtcgcactaacatgcgccgcaccgtcaagagtgctcctcagagcatttggtatggccctgaccgtcccaagtacttgggtccattctcggagcagattccatcatacctgaccgga

SEQ ID NO: 83621 - DNA, 108 bp, Glycine max
  Clone ID: 700956896H1
gggaaagaaatttctgaccctaaccgcgtgtcgttaaaatcctcaaacgcagagtagacatagaattatcaaaaagcggggaaagggagattgaattcgatcctggga

SEQ ID NO: 83622 - DNA, 283 bp, Glycine max
  Clone ID: 700956901H1
aacactcattaattgcaagaatggcacttcgttgcttggtgatgtccctttctgttctcttcactcttggtcttgcgagagaaagccatgccagagacgaagatttttggcatgctgtttggccaaacactcccattccaagttcattgcgagatcttctaaagcctggccctgcaagtgttgaaatcgatgatcaccctatgcaaattgaagaaacacagtacccgaaaaccttcttctataaagcagaccttcatccaggcaaaacaatgaaagtacaatt

SEQ ID NO: 83623 - DNA, 277 bp, Glycine max
  Clone ID: 700956902H1
agagagtgagagagtgagtgagatagagagagacgcttcgcaaatctcaatcgaatctcagaaaaatgagagaaatcatcagcattcacataggtcaggccgggatccaggtcggaaactcctgctgggaactctactgcctcgaacatggcatccagcccgacggcatgatgccttctgactccaccttcggtgtagcccacgacgccttcaacaccttcttcagcgaaaccggatctggcaagcacgtcccccgtgctgtcttcgtcgacctcga

SEQ ID NO: 83624 - DNA, 277 bp, Glycine max
  Clone ID: 700956903H1
acgtcaaggaccaaggggcgtgtggttcgtgttggtctttcagtacgacgggagcgttggaaggagctcattatctggccactggtgagctcgtgagccttagcgagcaacagcttgtggattgcgatcacgtgtgtgatccagaagaatatggagcgtgtgactcaggctgtaatggtgggttgatgaacaacgcatttgagtacatacttcagtctgggggagtacagaaagaaaaggactatccatacaccgggagagatggcacctgcaaatt

SEQ ID NO: 83625 - DNA, 279 bp, Glycine max
  Clone ID: 700956904H1
aaaatttaaagaaatcaacacacacaaacacaacaacatatggaggtgctaagggtgcaaaccatagcttccaaatccaaagatgctgccatcccagccatgtttgttagggcagagacagagcaaccaggcatcacaaccgttcaaggggtgaaccttgaggtgccaattattgattttagtgacccagatgaagggaaagtggtgcatgagattttggaggcaagtagggactggggcatgttccaaattgtgaaccatgacatacctagtgatgtt

SEQ ID NO: 83626 - DNA, 279 bp, Glycine max
  Clone ID: 700956906H1
agatagagaaaaaaaagcaaagcaaagaaggttcacgttcacgttctgttctgttctggttcacactttcacgagccgcatcaccgactctctgcacctgcaactgcaacttccaacttcaacttcaaccactgcaagcttagctctgaaagaaaagaaaagaaaaagaaaatatctccatttggtttggttggtgaaagttgaaaccttttcacgagctcaagttggtagtaacttttttaacttggcggtctctttttttctacatcgactctcgtt

SEQ ID NO: 83627 - DNA, 275 bp, Glycine max
  Clone ID: 700956907H1
atttgctggtcctcttcctcctcactatctgcgcccctcttcctcccctgtttcgttccactgagcaacacgcttctcagttgcatgacataatacagagtgttcaattagagcataatgggatccaaaaatgctcatgggaagaaccacaaggacaaaaggaacaaatttaaggataatttgagttctagttattcatcacccagtgatgccaaggttatcctcatcagtgatcctcgatattcaaaggctcacacggatcctcggttccgtga

SEQ ID NO: 83628 - DNA, 278 bp, Glycine max
  Clone ID: 700956908H1
agggcagcacgcttgtccgggagcagagtagatgccatggaagaactggatagcgaagataaacgagtcttgagtcgaatcaagtgctggtttctatcacactcgcaacatctgaatttctttactattctagtgcttgcttcggttccaaatcctctatttgaccttgctggcattatgtgtggacaatttggcattccattttggaaattttttcttgcaaccttgattggaaaggcaatcattaaaactcacatacagacgatattcatcatctc

SEQ ID NO: 83629 - DNA, 277 bp, Glycine max
  Clone ID: 700956909H1
catgatgcttgtgaagaatcctgcacttttcgatgtactagtgatgcctaacctttatggtgatattatcagtgacctttgtgctggcttgattggaggattgggcttaacaccaagctgcaacattggtgagggcggtattgcacttgctgaggctgtacatggttcagcacctgatattgctggaaagaatttggctaatccaactgctttactgctgagtggtgttacaatgttgcgccatttggacctccacgacaaagcagaacagattcag

SEQ ID NO: 83630 - DNA, 180 bp, Glycine max
  Clone ID: 700956233H1
tcacattcaccctttgttcttttggtctaccctgtaaatggaggaggagaaacagagaggcaaagggcacagactattgctgatgccatcaccattacaaggccacataacaccatttctccacctcggtgacatcctcttctcaaagggcttctccatcaccattctccacaccacata

SEQ ID NO: 83631 - DNA, 250 bp, Glycine max
  Clone ID: 700956238H1
ggatccccctgtgggttgcaccgccgaccgaccctgatcttctgtgaagggttcgagtgagagcatacctgtcgggacccgaaagatggtgaactatgcctgagcggggcgaagcagaggaaactctggtggaggcccgcagcgatactgacgtgcaaatcgttcgtctgacttgggtatagggggcaaagactaatcgaaccgtgcagtagctggttccctccgaagtttccctgaggatagctggagc

SEQ ID NO: 83632 - DNA, 225 bp, Glycine max
  Clone ID: 700956239H1
tcgccgaactgaacgaggttctgacacgtgagttggcggaggacggttactccggcgtggaggttagggttactccgatgcgcaccgagactatcatcagagccaccagaacccaagccgttctcggtgagaagggaaggagaattagggaacttacctcagtggtgcagaagaggttcaaatttcccgagaacagtgtcgagctttatgctgagaaggtcaaca

SEQ ID NO: 83633 - DNA, 118 bp, Glycine max
  Clone ID: 700956240H1
ggataggattggggagagaggataagacattaacagcaacactgagctctaactcgaatggcggttgcactaacgagttgcatttcctcatcctcggctctagtctccacagttgaat

SEQ ID NO: 83634 - DNA, 250 bp, Glycine max
  Clone ID: 700956241H1
ctgaaaatgattcttctttacagtaaatggcattcagtatgctaagagattatgacaattacgtgttattatactggcaaataatagaattgcaggctaacaaacttatatattgttagcattacataaaaaataactgatggtaaggcagggggatttataagatattatttgccagtataataacacgtaattgtcataatttcttagcatttgaaatgccatttactgaaaatgattcttctttaca

SEQ ID NO: 83635 - DNA, 250 bp, Glycine max
  Clone ID: 700956243H1
attattattagggtttggcgattcagagagaaagagaaatgggagaacgataaggaatcccaattgctctggggctcttggcgatgctcctcttcttcattgcttcttcctcttcctctcacctcgttcgtagattccgatgacgccgacgacgcgatcttctacgagtcattcgtcgaggattttgacggacggtggattgtgtccgacaaggacgattactacggtgtctggaagcatgctaagagtg

SEQ ID NO: 83636 - DNA, 138 bp, Glycine max
  Clone ID: 700956244H1
cttccagatagtcagcttcaaataaaaaataatttgcaagccaaataacagaacgtgttgcacgcattagttacttatgggatgagacttgcctcactaaaatgcattgaaccacctaaattggatgctaatagaata

SEQ ID NO: 83637 - DNA, 138 bp, Glycine max
  Clone ID: 700956245H1
cttcttcgctgcaactctctaccttccctctttttccgaatctgaatagaaatggcttcggagactgagacgttcgcttttcaggccgagatcaaccagctcctcagtctaataatcaacaccttccacacaacatag

SEQ ID NO: 83638 - DNA, 250 bp, Glycine max
  unsure (1)..(250): unsure at all n locations
  Clone ID: 700956246H1
agctncaccgaatcggctcgaggcaccacaccactgtccaataagtccaacatggctcaagtgggttctctatcttccgaaatggagacactgaatcatgtcctagccctagtggaggcattccgagcatttggcgcggacaacgatggccgaatcacgcaggcagagctaggaggaatcttggggtcactcgggtacaaccctagcgagcaagaagttagggcaatgattgaacacggcgacaagaaca

SEQ ID NO: 83639 - DNA, 251 bp, Glycine max
  Clone ID: 700956247H1
atatagcccaagccctatacaaccaaaccctaacacacacccatttgattcagtttccatggctagcctcaaggttgcatttttggctgcagtgctctgcatggttgtggtgagtgcacccatggcacatgcagctatcacgtgcgggcaggtgacgaatagcctgatcaattgcatcggttacctccagaacggaggaacgccgccgtcgggatgctgcaacggagtgaagagcctcaatgccgccgcca

SEQ ID NO: 83640 - DNA, 252 bp, Glycine max
  Clone ID: 700956248H1
cagattttcatgctcctcctttcattaaattaaagaacagtttctaggtatggaaactctttcatatgggtcagcaccatgctgccaagttgtgaactcaaagtggaaattagttgaaaagagtttgagttcacgtcaatcaagagtttcctctataggaaaacttggagtttattacacaggtactatttctgcatgtgcgcctgtgagattttatgagatgggtactagggtgcagctaagaagctcaaa

SEQ ID NO: 83641 - DNA, 255 bp, Glycine max
  Clone ID: 700956249H1
tgatgagtttttgaaacctaggattgcagattttggacttgctaaggttattcaggccaacgttgtcaaggattcctccactcatgtcattgccggaacccacggatacattgctcctgaatatggctacacgtacaaagtgaatgagaagagtgatgtgtacagctttggagtggtgttgatggaactagtaactgggaaaaggccaactgaaccagaatttggggaaaataaggacatagtgagctgggttca

SEQ ID NO: 83642 - DNA, 247 bp, Glycine max
  Clone ID: 700956250H1
gtgcttttgacagttaagccacaatatggatttggtgagaaggggaagccagaacaaggggatgaaggtgcagtgccaccaaatgcaacattgcagattactcttgaattagtttcatggaaaactgtttcagaagtaagtgatgacaagaaggtcataaagaagatcctcaaggaaggggaaggatatgagcgtccaaatgagggggccattgttaaagtgaaactaattggtaagctacaagatg

SEQ ID NO: 83643 - DNA, 250 bp, Glycine max
  Clone ID: 700956251H1
gtgcccacagacaataaccctttataataaataaaaaaatctcggtctgttttttttctcttctttttatctctctctctcacaaatttctttcccttttgttcactcaaaagagcagatagggacaagatcccggaaaggcgagccaacgtcagagagactcatcagttctcactcgtacggcgcttttgctttgctttgcttcattcctttcatcgtcatcataaagttcgttcctttctcagttttc

SEQ ID NO: 83644 - DNA, 245 bp, Glycine max
  Clone ID: 700956252H1
atctgatccaaaatggcgacgatgacgagcttgattggtctcatcaataagatccaacgagcttgcaccgttttgggagatcacggtggcgagggcttgtcgctctgggaggctcttccctctgtcgccgtcgtcggtggacagagttcagggaaatcgtcggtgctagaaagtgttgtcgggagagattttctgcctcgtggatctggtattgttacacggaggccactagtgctgcaacttca

SEQ ID NO: 83645 - DNA, 247 bp, Glycine max
  Clone ID: 700956253H1
caaagagacaattcaacttaagagatcaatatggccaccaccactacccagcctccctctaatatctgttttttccttctgttgttgcttctagcacactttcatttgggcataagccaacttgagctgaattactactctaaaagctgcccaaaagctgaagagatcatcaaggaacaagtcacacaactatataacaagcatggaaacactgccgtttcgtgggtcagaaatctcttccacgatt

SEQ ID NO: 83646 - DNA, 251 bp, Glycine max
  Clone ID: 700956254H1
gggagactgaatccagaaacctacaaattttttgatgcggttgagaagcattatggaattcacattgagtacatgttccctgatgcggttgaggttcaggcattagtaagaactaaagggctcttctcattttacgaggatgggcatcaagagtgctgccgagtaaggaaggtgaggcccttgaggagagcccttaagggtctcaaagcatggatcactggacagagaaaagatcagtctcctggtactag

SEQ ID NO: 83647 - DNA, 176 bp, Glycine max
  Clone ID: 700956255H1
ctcgcagcagctgatatctcatgttgttcttgttcctaacaaagtagcatctaaaaccatggcatcttcaccggacaccagcaaaaccataaagctgatgcgttacaacagctacctccgcagactcaacagcttcaaactccttaagacatccttcatcctcctcctcctcgtct

SEQ ID NO: 83648 - DNA, 130 bp, Glycine max
  Clone ID: 700956258H1
gatcgctccatgaagctcattgcggagcttccagaatgcagcacgcttcgagttcctaagatttacacgatttttggtgttgttgggatgttgaagctgttggctggatcatatttgctggttataactg

SEQ ID NO: 83649 - DNA, 246 bp, Glycine max
  Clone ID: 700956259H1
caagacacttacttccaaagatcgatttgagatgtggggagatggattgcaaacaagatccttcaccttcattgatgagtgtgttgaaggtgtactgagattgactaaatcagacttccgggagccagtgaatattggaagtgatgaaatggtcagtatgaatgagatggcagagattgttcttagctttgaggataagaatataccaatataccatattcctggcccagaaggtgttcggggccg

SEQ ID NO: 83650 - DNA, 247 bp, Glycine max
  Clone ID: 700956260H1
ctgatcgctccctgagagagctcgtcgcggcggttgcagaagaagattgcaagatgaagttcaacatcgcgaatcccaccactggatgccagaagaagctcgagatcgacgacgatctgaaactgcgagcattttgggacaagaggatctcacaggaggtcatcggagatgcactcggtgaggaatttaagggctatgtcttcaaaattaccggaggttcgtcacaaacaaggatttccaatgaagc

SEQ ID NO: 83651 - DNA, 248 bp, Glycine max
  Clone ID: 700956261H1
aaaaatgaaagcccaaagtgcttctctcctctgtctttttctctctcttgctatccttttggctagtggcactgctgcaagtgcaactccaagaagcgcagtgccaagccaccatgtttcaacattcaacagaagcctttttccttccacttttctctttggagttggttcttctgcttaccaggcagaaggagcagcaagtgtagatgggagaggaccaagcatatgggacacctacactagacagc

SEQ ID NO: 83652 - DNA, 246 bp, Glycine max
  Clone ID: 700956262H1
ggaatgcaggacattctcctgtttacttgttttcatctagagtgaacgacggaatttgtgattgctgtgatggaaccgatgaatacgatggtcaagtaaagtgtccaaatacctgctgggaggctggtaaagttgctagagacagactgaaaaaaaagattgccacttatcaagagggtgtcaaattgcgaaagcaagaaattgaacaagctaaagtagctatggagaaggatgaggccgaacttt

SEQ ID NO: 83653 - DNA, 246 bp, Glycine max
  Clone ID: 700956264H1
tggccactttcttcacccaaacctccttcccctcccactctctctccaaaactttcgatacccatttcgcaccatccacgaaagtcaacgtatttgcgaacttcccggcgaggaggcacgtgggggttcgagtttcgaacgcgctgatcgaaccagacggagggaagctggtggagcttgtggtgagggataattcagaaagagacttgaagaagggtgaggctctttcgttgccgaggatcaagc

SEQ ID NO: 83654 - DNA, 245 bp, Glycine max
  Clone ID: 700956265H1
ctagagcgagaaagtgagaggagagagaaagtagcagatcctccatggcctccaccaaggaacgtgaaaacttcgtctacgtcgccaagctcgccgaacaagccgaacgctatgaagaaatggtggaagcaatgaagaatgtggcgaactaaacgtggaattgacggtagatgagcggaaccttctgtcggttgggtacaagaacgtggtgggtgctcgtaggccttcgtggaggattctttcct

SEQ ID NO: 83655 - DNA, 250 bp, Glycine max
  Clone ID: 700956266H1
gccgaggagcatgtgtttagccaccactggatccgcatgattaattctgttttcgataacgtagcgaagaagagaaaaagggtaagtaggaggacgaaacgatgggttagaggatcttatgggacggaattttttattgcatgttgtagcgatgagtattgagacagagggagcatttactgtggtgccggagcatcaatggaaaacgacaaaaacgttgattggtgggtcctttcttcttcaattcaat

SEQ ID NO: 83656 - DNA, 248 bp, Glycine max
  Clone ID: 700956267H1
aattcaacgtcctttggaacgcgtgtgattcgtataaaacaaacacacatatcacataatgttcccgcagagttttaacattagtggcggtggtgccgggcttgaacaactgttgcagcctcatcacttcccatctccaatggaacaacaacaacaacgttccaggtggaaacccagcgtcgaggtggcacccaattgccctcgctgcgcctccaccaacaccaaattctgttactacgacaactaca

SEQ ID NO: 83657 - DNA, 263 bp, Glycine max
  Clone ID: 700956268H1
gtccagattagtaccacaaaaatggagaaatagaataactgaatatcgtatagctcaaaataaagatttaaccaaatgcaattcatatgaaaaaagcagattaattctttacaaagaacaacaagtgaaacgcattaaaaaacaaaaattatgaaaacaatatcagagtacgatctttctatcctcataattttgatcaattgatgcagatcaagagaagagctcatacgatttacatggataatagatccctatttacaagt

SEQ ID NO: 83658 - DNA, 221 bp, Glycine max
  Clone ID: 700956269H1
agaggatcaaaagtcaaaatcataatcaactacaacccaccaacaccaccatgcagaggtggaagtggaacagaaagaaaccccccattttccctttgcttgtgcttattttattgtttttcatggattcgttgtatggtctgatcactggggagggttgatgaggctatgaaaatcaatatcatgagcacaagcaaagggagaatcgggggttacttttg

SEQ ID NO: 83659 - DNA, 244 bp, Glycine max
  Clone ID: 700956270H1
caattccgctcccttttcctaacctcaccggcgggtgctcgtactgctactgtcgatgcctagaagggcggcggtcatcgtgtcggcggcgacggcggagacccgaagaagaagggcgaatcgaaacggttcgtggaagagatgaggttcgtggcgatgaggctgcacacgagggaccaggccagggagggcgagaaggaggtcaagcagcccgaggagaaagccgttaccaagtgggacccat

SEQ ID NO: 83660 - DNA, 110 bp, Glycine max
  Clone ID: 700956272H1
attcattccaaggagggatctctctctctctctctttctctcctctcacacccccaaaagcttcttctgttccgtgcaggcaatttttactctggtttcggcttgcatct

SEQ ID NO: 83661 - DNA, 55 bp, Glycine max
  Clone ID: 700956273H1
ggaaatttccatctaggattgatcgtcctgtggctagtttggttgtttccacacc

SEQ ID NO: 83662 - DNA, 245 bp, Glycine max
  Clone ID: 700956274H1
aaagaatgtaactggcatctaccactactggcaggaaaagaacatagaccgaacattgtggaaactcggtaccttgccacctggactgctgacattttatggattaactgagcccttggatccatcatggcatgttttgggttttggctacaccaatgttgatcctcagttgatagagaggggagctgtattacacttcaatgggaactccaaaccctggttgaagattgggattgagaagtaca

SEQ ID NO: 83663 - DNA, 246 bp, Glycine max
  Clone ID: 700956275H1
ctttttctcacccaaatccacgcttcccttacaccgcgtttggatctccgttatacaaactcattaaaatgttgcgagagaaaaacaaaacagaaaaaaaattcagttaattattaaattttgttatggctttccacgaccatctccagcacgagatagcgttccagcgtttcacggaggagcaagagttgaacgagaatagagacatgcaacagaggctcccacctccgacatggctcaacaacg

SEQ ID NO: 83664 - DNA, 246 bp, Glycine max
  Clone ID: 700956277H1
cagtcacaatggtttcttctaattgctactatcttgcattggtatgctgctgtgttctgctgctgctgaaccccaccgtgggggagcaggacgagcagaacttggtgctccagtaccacaaaggcgcgctcctcaaggggaggatcaccgttaacctgttatggtacggcagcttcaagccaatccaacgctccacaatcgttgacttcataaagtcgttaagctcctccccgggggccccacttc

SEQ ID NO: 83665 - DNA, 210 bp, Glycine max
  Clone ID: 700956278H1
tctcgagcggatcggctcgactaggaacaagagtttatttcagattagctcggttcttcaaaaggcctcatcactttaagggttagctatttatatatatatacttctgtgacctcaaaattgagctgagttgtataactgcaatgggtgtttcgtggtggaagctgttttttgctgctcttgctgggattctactctcaacccaacata

SEQ ID NO: 83666 - DNA, 124 bp, Glycine max
  Clone ID: 700956279H1
ttcccaaatcaggaaacactttctcatcttccctttcccagtttcacaccctatatcatagaaagctctgtcaacgaacgtcttcattttgggaagattggatatggatgcgatcattacagga

SEQ ID NO: 83667 - DNA, 76 bp, Glycine max
  Clone ID: 700956281H1
ggttgaactccaagaacctcataaaacctggactctctctggcatcactcgctctctctgtctctctctctctcta

SEQ ID NO: 83668 - DNA, 242 bp, Glycine max
  Clone ID: 700956282H1
gttttcatgacataaactatcatcaactgttgctttccattttggctataattccacaaaatgtgccattctttgcaagtgtaatattactagcatttccatatatcagtccatggcctccttaatgctcaatggagctcatcaaaatccaaacctcattagtggcatagctccaaatggccttaactttcacaacaagtgtttattccaaaagggtgtgctgtctcatggtaacaagttaa

SEQ ID NO: 83669 - DNA, 253 bp, Glycine max
  Clone ID: 700956284H1
aggataaggaaggtattccaccggatcagcaacgtcttgtcttcgccggaaagcagttggaagacggcagaaccctcgccgattacaatattcaaaaggaatcgacgcttcatctggtgcttcgtctccgcggagggatgcagatcttcgtgaagacgctcaccggaaaaacgattactctggaggtggagagttctgatacgatcgataacgtgaaggcaaagattcaggataaggaggggattccaccgga

SEQ ID NO: 83670 - DNA, 180 bp, Glycine max
  Clone ID: 700956285H1
tagaatataatcattcactctgtttctattcttctttctaccatagcataactaagatatgaacaccatataataattaacaacaataatttaataatactctcttcattgtaaattccatcttcacttcacttttcttctctgttctgtggagtatttaatcatttccacacaacatac

SEQ ID NO: 83671 - DNA, 66 bp, Glycine max
  Clone ID: 700956286H1
accgattccactcactcaacaatcgtaagattaaggcgttttgagctcatagaacaaccacctttc

SEQ ID NO: 83672 - DNA, 243 bp, Glycine max
  Clone ID: 700956287H1
cttgttcccatttcagaagagattagccttgtcagcagactaatcaatgcaattgcaaacaatgcatgcaaagaacagctcaccactggtttgcaaaaactggaccacagcttcccttctaaaaccacctcaaacatggaacctgaaacaccctcagaatggtgggggaaatctctcaatgttcttagtcttgatttctttcaaagagttttgtctgcagtgaagtcaaagggattaaaacaa

SEQ ID NO: 83673 - DNA, 243 bp, Glycine max
  Clone ID: 700956288H1
ttcgagctgcatatttatcacaatctgctaagcagaaagtcagtctgctggttccatggctttgtaaatcagatcaagaactagtttatcccagcaatgtcacttttacttcgccagaagaacaggaagcttatatacgtagctggcttgaggaaaggattggtttcaaggcagacttcaaaatttctttttatcccgggaagttttcgaaagcaagacggagtataatacctgctggagata

SEQ ID NO: 83674 - DNA, 88 bp, Glycine max
  Clone ID: 700956289H1
gagcaaattctcgaacttctgttgcaaattcccttacctgcggaccagccgctttcacagtgtcgtctaagttctccactccacacag

SEQ ID NO: 83675 - DNA, 246 bp, Glycine max
  Clone ID: 700956291H1
cctgacccgaaccaagttcccaaggagttcacctgccccatttccggctcactaatgtccgaccctgtcgtcgtagcctcgggccaaaccttcgaacgcctcgccgttcaactctgcaaagacctcaacttctccccgaagctggacgacggcacccgacccgacttctccaccataatccccaacctcgccatcaaaacgacgatcctccactggtgcgacaattcccgcacccaacccccgctc

SEQ ID NO: 83676 - DNA, 244 bp, Glycine max
  Clone ID: 700956292H1
attttatttcttggcaaatttacaacaacagtgaggcttaattggaagcagtggctcatctctgtcgttattggattgattggttggcctcttgctgtgattgggaaattgataccagtgccaacaactcccatcaacaatgttttttcaaaatttcgaatttctagaaaggatcatgaggaatctcaatagatttggcgttgtgctgtttcaaacaattctgctgtttcttttgttctctgac

SEQ ID NO: 83677 - DNA, 244 bp, Glycine max
  unsure (1)..(244): unsure at all n locations
  Clone ID: 700956293H1
atctcattttccctccaatttccttctgggttttgcaatttggccaattgggtccccaaagctgtgaccttttcctctgatcaacgcgaagganagagaaacacccagagagagaaagagaaaaagaaaagttgttgttttcttttgttctttgggggtgttggtttaaaacccggggttgaagcattgcagacatcatggctattcaaggagttcgccactctctttctcatgcccgttgtgt

SEQ ID NO: 83678 - DNA, 244 bp, Glycine max
  Clone ID: 700956294H1
gtattaggctactccatcttcatgggcttgtctgtgtcacagtacttcaatgagtacacagcaattaatggttatggtccagttcacaccaaagcaagatggttcaatgatataatcaatgtcccattccaatcaaaagcatttgttgcgggttgtgtggcatatttcttggacaacacactacacaagaaggaagctgctattaggaaagatagaggaaaacattggtgggacaagtaccgtt

SEQ ID NO: 83679 - DNA, 245 bp, Glycine max
  Clone ID: 700956295H1
ataaatcctgcaatgtctggtggttatcctcaacaaggttaccaatctcgaccaccctctgattgggctccccctgccccaatgcagcaagctggttatggctatgtgcaacctggagcatactctggtccatcaccccagtataacatgcctcagtaaccatatgcaggctatcctgcccagcaacctggtggatattccaccaattgggaccagtctactgcaccacctccaccagcagtcta

SEQ ID NO: 83680 - DNA, 247 bp, Glycine max
  Clone ID: 700956296H1
tgctcccttcgctttcccttcattcacatttcgcagggcgcttctttctcattgctggcaaaatggcaaatgtagcgtccggaatggctgtgcacgatgattgcaaactgaggtttcaagagcttaaatcaaagaggagctacaggttcattgtgttcaaaattgaagaacagcaagtggtggttgagaaattaggggaccccacggaaagttatgaggactttagtggccagttttccagctaatg

SEQ ID NO: 83681 - DNA, 240 bp, Glycine max
  Clone ID: 700956301H1
gctagaagcaataagatgaaaatgaaagtgcttgtattgtttgttgctacagttttggtagcatatgaatgccatggctcagactaccagaagttccctctctcaatgaaaactgggtttggtgggcaatacagcaatgaggtggcatgtgccagttggaggcttggcgtggaagcaaacaacgtagtcaagtggcaaactgttcctgcagcttgcggagagtacatagctgactacgtt

SEQ ID NO: 83682 - DNA, 249 bp, Glycine max
  Clone ID: 700956302H1
ttcggctcgaggctcctctcatggagattgtaaatattcttttgatgccagtggattgacatcatacagcttctgctctagtgatcgaaaccatggtggctttgactgtagcattgaaattgtatcacataaagggcatatactacaatcaatttatctcatttaatcaaatgctgcagccatacttcctgcctattggtcccttcggcagaaggcatttgcagaatgggttttgtacacatccagtgg

SEQ ID NO: 83683 - DNA, 240 bp, Glycine max
  Clone ID: 700956303H1
caccctcatccgtgaaacccttcttgtgtgacacaccaaactccaccactgatgaaagcactcacaagctcttgttccaagaccgttgtcgacaccctaggacccttttctcccagagtttgccttcgtgtttcttatagacccgaattctgctccacccttcgttccaaaaatgagaaaaagagttgcaattcattgctcctgaaactggttcggaacaagggtgttgtttacccggtt

SEQ ID NO: 83684 - DNA, 238 bp, Glycine max
  Clone ID: 700956304H1
tattagcttcagctggaatcaaggtggtgctcactgcaagaacatgaagagaggggtatccaagcactgcaaacactcaaggactcgggtctatctcaccttgtactgtttcatcaagttgatgtggctgatgcaacaagcgtagcttctctggcagattttatcaaatctaaatttggaaaacttgatattctggttaacaatgcagggattcttggagctgtaattaaagacactg

SEQ ID NO: 83685 - DNA, 239 bp, Glycine max
  Clone ID: 700956309H1
gcacaagagtctccaatcccaactctctctctctctccacttgccaaaggaaaaaggctaaagagaaacccacacacacacacacacacagaaatatgtcttccccaagcaagcgccgagagatggacttgatgaaactgatgatgagtgattacaaggtcgagatgattaatgatggaatgcaagaattttatgtgcaattccatggacccaatgacagtccttatcatggtggtgtg

SEQ ID NO: 83686 - DNA, 234 bp, Glycine max
  Clone ID: 700956310H1
ggagataagatattgaagtagtgctaagtgcctaacacctgcagtgaacaatggcctctgcatcagcatctcttctcaagtcttcacttgttcttgataagtctgagtgggtgaagggacaaacacttcgccaaccttctgctgcatcagttgtgagatgcaaccccaccaccccatcaggcctcaccatcagagctggttcctatgctgatgagctcgttaagaccgcgaaaa

SEQ ID NO: 83687 - DNA, 236 bp, Glycine max
  Clone ID: 700956311H1
caaactttgtaacttcaaaacatactcctctgttctctctgtttctcttcaatcttcctgaaaaaaacaaaaacacgaaaaatcatccaccctctcacattctctctctctctcctttcaactaatatggaaattgaaaaccaagacaacactgtcagagaaatcaagccaaagaacaggagaatcatgggtgctggaggccctgatgatgacgacaataggtggccaccgtggtt

SEQ ID NO: 83688 - DNA, 237 bp, Glycine max
  Clone ID: 700956313H1
ggcaagatgtcgaagagaggacgcggtggttcggcggggaacaagttccggatgtcgctgggtctgccggtggcggcgacggtgaactgcgccgacaatacgggggcgaagaacctctacatcatatcggtgaaagggatcaaagggcgtttgaaccgtctcccctcggcttgcgttggcgacatggtgatggccaccgtgaagaaggggaaacccgatctgaggaagaaggttttg

SEQ ID NO: 83689 - DNA, 239 bp, Glycine max
  unsure (1)..(239): unsure at all n locations
  Clone ID: 700956314H1
cttatggtatctattctctctctttctttngtgttctaagcagctagaagcaatggagaggaaaagaagctatgcctctttcatcatgtttgcaatgcttgttggagtgatctttcagagccttgtctatcctgtagtatccaccactgttgaagatcagaagaactactacaccccagatccacatgctggaagtcccccctcaggctcacacagtagtactcctccatctcatggcc

SEQ ID NO: 83690 - DNA, 240 bp, Glycine max
  Clone ID: 700956315H1
aaaaataacccaaactctcttttaaaaaaaaacccgaacacatagaaacagagaaagtttttgaagcgcttccagtggcgtatttacggttatacccttcttgttatgatagcttccaatcggcgtcagcacagagccgaagctcttggcttccacacatattttcggtcctgtcgattgagatacaaagccgccaagccagccgagccaatcttcaaattccaactttacccctaccgg

SEQ ID NO: 83691 - DNA, 228 bp, Glycine max
  Clone ID: 700956316H1
tggtgcttgtgcgagctgatctttgctaaggtcatgagcaggttgctggagagttactgttgcgtggtagagaacagggagaggtacgagatattctcgcaatacctcaggttcatccgctcccacaacaagaaccgcttgccctacactctctctgtggatcatttggcagatggtaattgtgctgatgtcaactttcagtgagtatgcgctgctcaaaattgctct

SEQ ID NO: 83692 - DNA, 225 bp, Glycine max
  Clone ID: 700956317H1
gctagagcatatatccttgtaaaaatatgtaagaaaatttagactcagaaaagaaaaatatttgaaggacaaattttagtttcacaacagaataggcatctttattattaccaagaaaaaggagaaattgtccttggcttattaaaccctgtttgatgcttgttccaaacttgagaaatatttggatattgagatttgaaatacaagattagtgttcagtttgat

SEQ ID NO: 83693 - DNA, 238 bp, Glycine max
  Clone ID: 700956319H1
cattgattcccaaaaccctaattgaagttctctcctccacactatatattgcagattttgagtgagtctatcccttaaaggctctctcttgcagtcgcagaggaaaaccctagctagtagtctcagttcgtttgagagagaaaaaatggcagagggtctcgttctccgcggaaccatgcgcgcccacaccgacgtcgtgacggcgattgccactcccatcgacaactccgacatgatc

SEQ ID NO: 83694 - DNA, 236 bp, Glycine max
  Clone ID: 700956320H1
ctggttatacttacacaataaagtcactgactacatggaagtttcataacactcagttcatttcgaaaccaaagcttctgcttttgtgatggaactagagagctgagaggcctaaacctctgtttgctctctcaccctttttggtgcagatcttgaacttgagctgcattttcatagaaaaccagcaccaagaaatggaacataccatgttacctgccattggatctgttttccct

SEQ ID NO: 83695 - DNA, 238 bp, Glycine max
  Clone ID: 700956323H1
ctccttcacattctccattccacaacatcaaggttcacaatcatgtcggggaagaggccccggccaatgatcggaaagttgtcggagttgttggtctcgagaggccgcacggtggcacttttggacaccactggaagcccaagaggcccattagacatgaagatgatgcaatcaccaagaggcttaaaaaattatgatcttggtggcgttggtcttggaattgtggtggctcttgata

SEQ ID NO: 83696 - DNA, 236 bp, Glycine max
  Clone ID: 700956324H1
gaagaaccttacaaagggcttttgaattttcgtgttttgatcagaatcagaggaaaaaatcacataatttcgaattcaaaatttgaattttcgtgtataaaacgaagagaagagaatggaatcggaggatttggtgaagcaggaattggaggaattgcagaaacaattggggaagaagctaaaatttgaagcctctatttcgtctctaaaatctcttctccaacgcacttacccat

SEQ ID NO: 83697 - DNA, 231 bp, Glycine max
  Clone ID: 700956326H1
ctagctagctagctagctagcaaatagcaatgttaaaaaaccaaccacaaccagattggcctgagcccattgtcagggttcagtccttatccgaaaactgcgaagattcaatccctgaaaggtacatcaagccttctactgatcaaccatccataaaaagttgtaattttgatgatgccaatattccaatcatcgaccttgggggactatttggtgctgaccaacatgtct

SEQ ID NO: 83698 - DNA, 234 bp, Glycine max
  Clone ID: 700956328H1
tttagccgagagaccaatcaacggatatgctttttgaatgttagtcctgatgaagttataagaagtctgttttataacaaaaataacgactcacttatcacagtttctgtatatgcttcagacagttacagttctttgaagtgcagaagcacaaggattgaatatataaggaggggtacaccagatgctggctttgctctttttgaatccgagtctctgaagtggccaggtttt

SEQ ID NO: 83699 - DNA, 226 bp, Glycine max
  Clone ID: 700956329H1
ctgccagtagtcatatgcttgtctcaaagattaagccatgcatgtgtaagtatgaactaattcagactgtgaaactgcgaatggctcattaaatcagttatagtttgtttgatggtatcttctactcggataaccgtagtaattctagagctaatacgtgcaacaaaccccgacttctggaagggatgcatttattagataaaaggtcaacacaggctctgcctgt

SEQ ID NO: 83700 - DNA, 239 bp, Glycine max
  Clone ID: 700956330H1
cgaccgcgttcttttctacggagcctcgaccaagaagaatcgcagagagaagagggtcagagtgagaaagagagagagagagagagaaactgagagaaattcgcaaaccctaatttcggaaagatcggcgatggctgcctccaaggatcgcgagaacttcgtctacatcgccaagctcgccgaacaggccgagcgatacgaagagatggtggaatcaatgaagaacgttacgaatctcg

SEQ ID NO: 83701 - DNA, 240 bp, Glycine max
  Clone ID: 700956331H1
cgcaattgcgaaatctctggaacaattgatttcattttcggatactccaccaccttgatccaaaactcgaagatcttggtgaggaagcccatggcaaatcagcagaacatagtggtggcagatggcacagggcagaagaacatgcccacaggaatagtcctccataagcgcgagatcatgccggaccctaccctcttggcagaccgcttgagcgtgaagacttacttggccaggccatgg

SEQ ID NO: 83702 - DNA, 227 bp, Glycine max
  Clone ID: 700956333H1
ggggcatcgtatttgattggtcggtcatagcaattagcaactccacccttcaaacttgaaaggaaaaaaggactttggttatccacgcaacataagacatacattaactaaactttctagaatcttcttctctcgccatggcagcgtcgtcgtcctccgccgcggcaaacatcatgctggcgatctccgagaagaagacgaacagtgtagatctgtatcgccctctt

SEQ ID NO: 83703 - DNA, 165 bp, Glycine max
  Clone ID: 700956335H1
gcgagccaagtagggttttcagtgatcccctcttatgtgttcgaacgcgacgaaggggtccaaccccgatccaggcgaattgagcgaattaactcagccgagcttcgacgagttccaacgccacaactatcacatatccatctgatggctccacaagcaagatct

SEQ ID NO: 83704 - DNA, 234 bp, Glycine max
  Clone ID: 700956336H1
catgactatttcaaaagatcgagtaaaaccatcacatctgccggatagctgtaagctagctgagatatttacaactagcgttgtgcttggcagttacttggcaatgatgacagtcatattcgtttgggcagcatagaaaaccaatttcttcccgcgagtatatggagattctactcttgagagaactgctcatcatgagttccgactacttgcctctgcaatctagcttcaagt

SEQ ID NO: 83705 - DNA, 236 bp, Glycine max
  Clone ID: 700956337H1
gtgctttgaaacaaaactaaagaagaaatgctgagacaagtgttgcgacaatgttactcacttcatcgtcccgcagtgaatgtgtacgcagtgccgcggttttatcggagaaggctttgttcttcttcttcttcttcagagtccactgccgctacatcctccatcgaccgttcttccctttacaatccacctgagcattctcaccaccccacttctgattccgaactcgtcaaaca

SEQ ID NO: 83706 - DNA, 233 bp, Glycine max
  Clone ID: 700956339H1
agaaacttgacaccgattagattaggggcttcgaacaaggagccccgaaacccaaaccctaatctgattcgctttcgattatggcgtctgagagcgcttctcgatcgagttccgcggccgattcgtacattgggagcttgataagcttgacctctaagagtgagatcagatacgaaggtattctctacaacatcagcatagaagagtccagtattggcctcagtaacgtgcgg

SEQ ID NO: 83707 - DNA, 234 bp, Glycine max
  Clone ID: 700956341H1
aaaagatgaagggaataaggaaaagaaggacaaagaaaaaggagacggtgatggtgaagagaagaaggaaaagaaagataaagagaaggagaagaaaaaggaaaagaaggataaagatgaagaaacagacacattaaaggaaaagggaaaaaatgatgaaggtgaggatgatgaaggaaataagaaaaagaaaaaggataagaaggagaaagagaaggatcacaaaaaggaaaa

SEQ ID NO: 83708 - DNA, 229 bp, Glycine max
  Clone ID: 700956342H1
caattctcctaattgctggctataatgtgtttgatcttgttggcaagtgtctgactgcagtttacctcctacacaatgcaaaagttgccataggtggttgcatagcaagattgttgtttttccctctcttcttaggttgcatgcatggtcccaaattcttccggactgagattcccgtgacaatactgacttgcctgttagggcttactaatggctacctaaccagtgc

SEQ ID NO: 83709 - DNA, 232 bp, Glycine max
  Clone ID: 700956343H1
cgaaaagacttttcatttaagagttgcagctattcttggtgaaattgaagctgagatggtctcagatagacagaagaaagaatctgctcctccagtaggtatttctgagaatggctcagagaaaacaatgtacttcttggctgaagcaacacatcccttcagtgctgaatcagaaaaggagctgagtttttcgaagggtgattttgttgttgtgcgaaaggtgagcccatca

SEQ ID NO: 83710 - DNA, 230 bp, Glycine max
  Clone ID: 700956344H1
atcgagcgaatcggctcgagagaagactcattttctatatgagccgggtacgtttggactcaattttggacgattaacaactggccagacaacagaaagaggaagataagagacgacatagggaccttaagaagatgcaagatctactcctaaatcaaaaggaagccatgtatggttctaaacctagtccaagaaaaaataacagctttagaaagactaatagttaccgt

SEQ ID NO: 83711 - DNA, 234 bp, Glycine max
  Clone ID: 700956345H1
cccacagttagtacaaaaaagggttacttcagcttccacatatcttgaagaattgatcaatgggcaagtctgtagttgagaagctactttggatggcaattgtgtgcttggtgctgggtgtaatttccattactcccaaggctcaagcagcagtgacatgcaaccaggtggtgagcaacctcaccccatgcatttcttatgtgctcaatggtggcaaaaccgtgcctggccctt

SEQ ID NO: 83712 - DNA, 237 bp, Glycine max
  Clone ID: 700956347H1
gttggtaagaatacgatcaaaacacttgtgtaaacatggcttaaggggataagatcttttggttttcagatgtggaatttgctagggagactttggcaggtgtcaacccatatagcatccaattggttaaggaatggcctttaacaagtaaactagacccgcaaatatatggtccacaggaatcaacaataactagggaagtcattgagccacaaattatcacttatggaacaattg

SEQ ID NO: 83713 - DNA, 240 bp, Glycine max
  Clone ID: 700956348H1
gatcatgcacattctttagccgatctttccataggaatatccatccttgctggaattgtactctttcttcttgtggagaagttagtgaggtatgttgaagaaaactcaggaagagctaattcatggacacatggacaccaccaccatcaccacaatagcaaggaaaaattgaaagatgataacagttctactgccaactttcagtcagaatttaataatgcaaaagaagagagattgata

SEQ ID NO: 83714 - DNA, 235 bp, Glycine max
  Clone ID: 700956349H1
cagcacagcacaacacaacacaaaaccctttcccaaaaaaataaaaaataaaaaatggaggaatccaaattcggccaaaccgacaagcgaaagcgcgtacgcaacgagtaggactcggccctcaactcgcccgactcgttaaagcatccccgagccgagtctaactcgttcgagtctctccgagttgactcggacgagtttgaactcgcccggatcgacccggttcttcacaaca

SEQ ID NO: 83715 - DNA, 234 bp, Glycine max
  Clone ID: 700956351H1
ggttggtaaggtggactttactattaggcatctctcttcatccacaacatcatttcctagcacatggacattcagtagtggtcaaccttgtattggaagtgatgcccatcagtgttcagcattctctgctagtccttcatcagagaaaacatggaccatgcgtactacctttccagaatatgttgttgcacttgctactattgttggatctgtgctttttgctatatttggtgg

SEQ ID NO: 83716 - DNA, 233 bp, Glycine max
  Clone ID: 700956354H1
gaaaaaattcaggattgaagtttttgatatatgggaggacaggttggataggggggttgttgggaaagctttgcgaagaagagagaattgattgggaatatgggagaggaagattggaagataggaaatcacttatgaaggatatgagaagggtaatgccaacccatgtgttgagtgcagctggtgttactggaaggcctaatgttgattggtgtgaatcacacaaggttgaa

SEQ ID NO: 83717 - DNA, 235 bp, Glycine max
  Clone ID: 700956355H1
ctctctctttctctacctttctgtgaatttctattgcattaattttctctacagaaagagaaaaaaaaagagcttccacaatggtgagcgctgcaattgctcgtaacgtcgtcggcgtaataggcaatatcatctcctttggcttgttcttttcacctgctccaactttctatggaatcgtaaagaagaagacggtggaggagttcaagccagatccttacatagcaacggtgtt

SEQ ID NO: 83718 - DNA, 214 bp, Glycine max
  Clone ID: 700956356H1
cacccttgaggtggagagctctgacaccattgacaatgttaaggccaagattcaggacaaagagggtatcccaccagatcaacagacggtgatctttgctgggaagcaacttgaggatggccggactcttgctgactacaacatccctcatcgagtacactcttcaccttgtactccgtcttcgtggtgggatttaaaagtctgagaacgctct

SEQ ID NO: 83719 - DNA, 231 bp, Glycine max
  Clone ID: 700956357H1
acgagttccgagttgcgagttgcagagagagcaatgagtcaggaatcgtttatacatagcttcgtggctcgggggacgatggtgttagccgagtacaccgagttcactgggaacttccctgcaattgcagctcagtgcctccagaaactaccctcttccaataacaagttcacctacaattgcgaccaccacaccttcaattttctcgtcgaagacggttacgcttactgt

SEQ ID NO: 83720 - DNA, 231 bp, Glycine max
  Clone ID: 700956360H1
acaagccataatagcattgggttcttctctagtctctgtcctaccacaaaaatggtcccaacaccaatcttagtcacaacaccaccgccggcaacttctgcaccctctccactgctcaacgcagaaacacccctcaaaacagaagaaaaaccccaaacacaaaccctaaaaacccccaccaccaccactcaaaaagctataaccaaaccaagcccatcatcatccaccacc

SEQ ID NO: 83721 - DNA, 219 bp, Glycine max
  Clone ID: 700956361H1
cttcagtaccacgactccaaggtcctggaacatgcctctgtttgtttgacacgaatagctgaagcatttgcatcatctccagacaaattagatgaattgtgcaatcatggactggtaacacaagctgcctctctcatttctaccagcagttctggaggtgggcaggcttctctcagcactccaacatatactggtttgatccgccttctttccacacaa

SEQ ID NO: 83722 - DNA, 217 bp, Glycine max
  Clone ID: 700956362H1
gtgatattttcccttctactttttcgttttctactattcaatgatcctttctcaccaacacaatgttcatcatatttaattaatccgtgttctaaagggaatattcagatagttcaactgcatattttattagtcacttcctgcgtcttcttcagtcattctctaaatttccggcatgggatctttttggtgccccttttacactcttccacacaac

SEQ ID NO: 83723 - DNA, 236 bp, Glycine max
  Clone ID: 700956363H1
gtttctcacaagacccctgcactgattccaatgccccaacctcaacctcttccaccttagttgtagatcactactgtgactacgacaagctcaaattcaaaacctttctcagaaaaatgttctgggaattcggtctcgcctgtgtggccaacccttcccagcaccggagaagctccggcgacggcaaaaagacgaacatggagaacaacaaggcgtggctgcttgcggagtctggt

SEQ ID NO: 83724 - DNA, 239 bp, Glycine max
  Clone ID: 700956364H1
agtttgggtctatatcacctgaccttgggaagctagagaatctgagggttcttgctcttcataacaacaacttctatgggtcaattccaccagagttgggaaaatgcactgaattggagggaatatttttacagggtaattaccttagtggagcgattccaagtgaaataggaaacctttcacagcttcaaaatttggatatatcaagcaattccctcagtgggaatattcctgcatca

SEQ ID NO: 83725 - DNA, 230 bp, Glycine max
  Clone ID: 700956367H1
caatcacattaagaaattaacttgctttcatagttttcacatatttgacgtgacatcatgaatatggaggggcagaagaaaaacaagagggtggctgttttggtgggttgcaattaccccaacactagcaatgaattgcatggttgcataaacgatgtgttggcaatgaaggacacgctggagaagcgctttgggtttgatccctctaacattgagcttctcactgatgc

SEQ ID NO: 83726 - DNA, 233 bp, Glycine max
  Clone ID: 700956368H1
ctcaagtccaacctacccctttttcttctcccaccaacttcaccgtcatcttcctcgatcatgtctcacttcaagggcaagtaccatgatgagcttattgccaatgctgcttacattggcactcctggaaagggtattcttgctgctgatgagtcaacagggacaattggcaagcgtttggccagcatcagtgtagagaatgttgaatccaacaggcgtgctcttagggagct

SEQ ID NO: 83727 - DNA, 233 bp, Glycine max
  Clone ID: 700956369H1
aaatgtgcattgactgcttcattttagtgaaggagacagagatctaacgaccggctctcgcaacagctctgccgtatttcctcaagatgatttcatggatatagatgatcagcatgatgcaggaattcccagaattccatcactacttccagcactagcagcaaatgttaatccatttactcttcttgatccaacaattgggagaggtatatttggtacacgttttgattcaa

SEQ ID NO: 83728 - DNA, 231 bp, Glycine max
  Clone ID: 700956371H1
aaaatgctcactttttttcttccaacgctccgcctccttctcatagccttcgccagctctgtcaccggccgccgtgacctcgtcggagactcgctccggctgaccgtcgcaactgataacgacgccaacttcacgagcagcccgtgggccgtcctcctcgccggttccaatggttactggaataactgagatcaggctgatgtttgtcacggctatcaaatagcgagggaa

SEQ ID NO: 83729 - DNA, 222 bp, Glycine max
  Clone ID: 700956374H1
atctgcatttgcatttgctctctgtcagtttgtaagaatcttaagctatgggaaagtcttagtcaagcgtgagcgctgattactagaaggccgttgagaaggcgaagatgaagttcagaggcttcatcgctgagaaattgagcgctcctctaatgctccgtttggcatggcactctgctggaacttacgacgtgagctcgaagaccggtggtcccttcggaa

SEQ ID NO: 83730 - DNA, 229 bp, Glycine max
  Clone ID: 700956376H1
caatgactcagttgaaagcatctcctgcgtctgcgtgttcgttccttgccattgctccttcctttcatcatgcatcactaacaacagggcaccttctgcgccatcaattctccaaggcaaagcctttgtcactcaaagagctggggctaaaaacaagcgttggtgccaataaacttcaagttattaaagcagctgcacgcattgatacagaggtagtttctgaaaccac

SEQ ID NO: 83731 - DNA, 230 bp, Glycine max
  Clone ID: 700956377H1
actcgagccgaatcggctcgaggtggtgggacctttgatgtcaacatcttgacaattgataacggtgtttttgaagttcttgctacaaatggagatactcatcttggaggtgaggattttgatcaaagaataatggagtacttcattaaattgatcaagaaaaagcatggaaaggatattagcaaggacaacagagcacttggaaagctgaggagagaggctgagcgtgc

SEQ ID NO: 83732 - DNA, 234 bp, Glycine max
  Clone ID: 700956380H1
caattttctagggtttatacaattttcgatggcttcttcagatgttgagtaccgttgctttgtcggtgggctcgcttgggccactgacgaccaagctctcgagagagccttctctcagtacggcgaaatcgttgaaacgaagattatcaacgatcgtgagactggaagatccaggggttttggatttgtgaccttcgcctcggagcagtccatgaaagacgccatcgaagggat

SEQ ID NO: 83733 - DNA, 230 bp, Glycine max
  Clone ID: 700956382H1
aaagtatttgctgatgctttttctgatcgcatatttaaatctccactgcttgatcttctgatcaaatctgggcgaaatggcaaaaacaatgggaaagggtactacatttatgaaaaggctggcaagccaaaacctgatccttcataactaccaatcattgaggagtctagaagactttgcaatattatgcccaatggaaagcctatatctgttactgaccaagagatcgt

SEQ ID NO: 83734 - DNA, 231 bp, Glycine max
  Clone ID: 700956383H1
ggcacttccttcccaaggggcattccggcctgaacttacccaaattatgaaccaactggttcagtttctcaactcaaatggttccccatttgttgttaatatctacccctttcttagcctttataacaatggagatttcccccaagagtatgcgttctttgagggaactacccatgccgtccaagatggttccaatgttgacactaatgcatttgatggaaactatgacac

SEQ ID NO: 83735 - DNA, 231 bp, Glycine max
  Clone ID: 700956384H1
cagatatctaccgagagggttaaacacttagcatctgctgagggtaccttggtagacaccacactacccataatatggtcgaaaacaacaacccaagggtttttggttcttctatgtttctatgtatgcttgtgttgatgatttggaacaagattgttgttgttgttccacaagccgaggctcgagcattttttgtttttggtgattcgctagttgacaatggcaacaata

SEQ ID NO: 83736 - DNA, 232 bp, Glycine max
  Clone ID: 700956385H1
ctgatgcagcaaagcataggcaatcccaagagcaggcaaggagaaaaaagatgtcaagagcccaagatggaatactgaagtacatgctgaagatgatggaggtttgcaaggcacaatggtttgtttatgggataattcctgagaaggggaagccagtgaccggagcatcagataatcttcgcgaatggtggaaggataaagtcaggtttgatcgaaatggtcctgctgccat

SEQ ID NO: 83737 - DNA, 232 bp, Glycine max
  Clone ID: 700956386H1
tctcgagccgattcggctcgagcaaggtctcatacaacaagctcaccccctacacctcttagattccaattactgtatacatttgcttgagaaatttcagtcagcggcttcggaatttctctttaaccctctttgcgtggcttggcaagattactttggagacatacatttcccagtttcatatttggttaaggtctaacatgccaaacggacagcccaagtggcttctttc

SEQ ID NO: 83738 - DNA, 235 bp, Glycine max
  Clone ID: 700956387H1
ctctctctttctctacctttctgtgaatttctattgcattaattttctctacagaaagagaaaaaaaaagagcttccacaatggtgagcgctgcaattgctcgtaacgtcgtcggcgtaataggcaatatcatctcctttggcttgttcttttcacctgctccaacactctattaaatcgtaaagaagaagacggtggaggagttcaagccagatccttacatagcaacggtgtt

SEQ ID NO: 83739 - DNA, 227 bp, Glycine max
  Clone ID: 700956388H1
tgaaaatacacttatcacaaaattttttggtctgcacaggattaaaccttcaagtggtcaaaagtttcgctttgttgtaataggaaatatgttctgcacagacttaaggatccatcggaggtttgatttaaaaggttcttcccttggaagatcatcagacaagatagaaattgatgagagtactacgctcaaagatttggatctgaactacagcttctacctggaac

SEQ ID NO: 83740 - DNA, 228 bp, Glycine max
  Clone ID: 700956389H1
gcacaccacacaaaaaagcaaaacagagagaacaactgttactcacacacgccatgggtaaatgaatggtttttgagcaacagcagttaaaagagaaaagggattcagcgaagatgacatcggttggtgtggcaccaacttcgggtttgagagaagccagtgggcatggagcagcagctgcggatagattgccagaggagatgaacgatatgaaaattagggatgata

SEQ ID NO: 83741 - DNA, 225 bp, Glycine max
  Clone ID: 700956390H1
ctccgctgttcctcctcccctattcgcctctctctcccttctctcatcgaccaccttcgccctctcttccctcatatggatgaccaggtcctcgagagagcgctccaagaatgtggcaacgacctagatgcggccatcaagagcctccacggcctctgtttgggatctgctgatgataattctcaacctgctccacaacctgaccaccctaacctcgtcgtcgac

SEQ ID NO: 83742 - DNA, 224 bp, Glycine max
  Clone ID: 700956391H1
gtcactaactcgctgtcattctgcacttctcatttcctccatatgacttccatagcctctccattttgtacgtgcctggttgccacttggaggaaccacctggttgccacttggaggaagcaccttcccaactccaaccttgtgaagcattgcaatcttgtgcctcgttcaggtaaagcgatggttgtagctttgcaacctactcaagacgctacaataatgag

SEQ ID NO: 83743 - DNA, 226 bp, Glycine max
  Clone ID: 700956392H1
gagatccaagaaaatcaggtaaagcatgagagcagttctaacaattcagaagaaccgagagaattcggtgacctcaatgatcttgaagcattgttggacgaagatattttcatgcctacagcaacttaaaatttcattgttaaggggtgatttagaatttcacagctgagttaggtgatcaactgtctcactttgattgttatagtaaattagtaatcttaattct

SEQ ID NO: 83744 - DNA, 231 bp, Glycine max
  Clone ID: 700956393H1
caagatactgtaattcttactcttattcaccgatttcccccaaatcttccatccaagaattttaatattttctcttccagatttcccccaatcttctccgcctctcttccttttcctttacatttctctctgattgaaacgccacacccatttgagaggatcttttttctagagaagccaacccaaagtgtgttttcatggggttgttgtgatcttgagaaactagagagt

SEQ ID NO: 83745 - DNA, 230 bp, Glycine max
  Clone ID: 700956394H1
ggagtctatgacagtagatcgtgtgaataggcttcccaacattaacccaaaggtagagacctttgcagaagcccgggattgtcttcttccaatgggaatcacttctgagaatgtagcacaacgttatggtgtgacaaggctagagcaagatcaggctgctcttgagtctcacaagcgagctgcagctgcaacagcagctggcaagttcaaagaagaaatccttccagttt

SEQ ID NO: 83746 - DNA, 233 bp, Glycine max
  Clone ID: 700956395H1
gtgccggcgcgcgctgaagtttgctaggttcatgagcaggttcgggaagagttaccgaagcgatgaagagatgagggagaggtacgagatattctcgcaaaacctcaggttcatccgctcccacaacaagaaccgcttgccctacactctctctgttaatcattttgctgattggacttgggaggagttcaaaagacacagactaggcgctgcccaaaattgctctgccactc

SEQ ID NO: 83747 - DNA, 236 bp, Glycine max
  Clone ID: 700956396H1
cttttccaaggtcgtccatttgatatgcttgatgctgctttatacagatacagttgccaaattccctgttgatatccagccatttaaagatatgatagatggaatgagactggatcttaagaagccaagatacaaaaactttgatgaactatatctttactgttactatgttgctgggacagttggtataatgagtgttccaatcatgggcatttcaccaaattcccaagccacaa

SEQ ID NO: 83748 - DNA, 260 bp, Glycine max
  Clone ID: 700956403H1
gagcggcgggtagaatcctttgcagacgaatcaaagcgacaagggctgaatctcagtggatcgctttcagtccctacagcaattcacctctatgatctccaagataggcttggactcaaccaaccaagcaaggttgttgattggttgctcaatgcagcaaaacatgaaattgatgaacttccaccacttcctattccttcaggtaacttcacccttggttatccctctcttgtttcttgtaatgaagttagcacctctcg

SEQ ID NO: 83749 - DNA, 255 bp, Glycine max
  Clone ID: 700956404H1
cctcgagcctatcggctcacgaagatgtttcctcaggaaactcatagtaacggctctcagcaggggccgggggtgggttacagtctcagagagcgagtccgtcgtggcactcgctggtcacgtgcctccacttcctccgttagggtttacgaccagcaccaaccgcaacatcgacctccttgcactgatttcgacgtcgcctatttccattcctacgctcaccttggcatccaccaagagatgatcaaggatcgt

SEQ ID NO: 83750 - DNA, 256 bp, Glycine max
  Clone ID: 700956405H1
gtgaaaaagggggagtttcttattccttctagacgcttccattgatcggcgatttctgatacatggcggagatcacgaacacgaggaagtgaagggtgagtccttgttggagaagatttctgggaagatccacgaccacgattcctcgtcttcgtcggattccgacaacgacaaaaccagcgccactgattccttcaagtctaatgttttcaggcttttcggcagagaaaagcccattcatcatgttcttggcggt

SEQ ID NO: 83751 - DNA, 254 bp, Glycine max
  Clone ID: 700956407H1
gcaaaatcttatcttagctaccccatcacaacaaccacgtcactatttctgatactctattaggcaaaaacaccaccaaatgggagaggaaaaggagcagcctaagaatgacaccgagaaaaagcccgaggaggtagcccccaagaaagacgacggacccatccctgtcgtttacaaactcgacttgcattgcgagggatgcgtcaagaagatcaaacgcacctgtcgccacttcgaaggtctggaaaccgtta

SEQ ID NO: 83752 - DNA, 259 bp, Glycine max
  Clone ID: 700956409H1
ggagagaacaagcacagcctcttagaaaagcttcaccgatctgacagcagctctagctcttcaagtgaggaggaaggagaagatggagagaaaaggaagaagaagaagaaggaaaagaaagggctgaaagagaagatcgaggagaaaatagagggtgatcatcatcatcacaaggatgaggacacaagtgtccctgttgagaaagttgaggttgttgaaacagcacatgctgaggaaaagaaggggttcctcgacaaga

SEQ ID NO: 83753 - DNA, 255 bp, Glycine max
  Clone ID: 700956410H1
cagaaagcaagctcatcctagagttttaaaaatggcagcagcctcctccatggctctctcttccccatccttggctggcaaggccgtgaagctgggcccatcagcccccgaagtcgggagggtcagcatgaggaagaccgtcaccaagcaggcctcctccggatgcccatggtacggcccagaccgcgtcaagtacttgggcccattctctggcgagcccccgtcctacctcactggcgagttcccaggtgacta

SEQ ID NO: 83754 - DNA, 255 bp, Glycine max
  Clone ID: 700956411H1
ggagtcatgattttaacaagtggattctatcgacttccaaatgatcttcccaaaccagtgtggaaattccctttctactacatttccttcctcacctatgctttccaaggactgttaaaaaatgaatttgaagacttgccattttcttcggaagttctagctgacacttggcacgtgcaaatgggtcactctaagtgggttgatcttgctctcatgtttgccatgattgttctgtatcgagttctattcttggcc

SEQ ID NO: 83755 - DNA, 256 bp, Glycine max
  Clone ID: 700956414H1
gtggtctgcaactatgagcaaggattatctaatcatactttctctccttctttccacggtgcttgcaacttcaagttcttcttcttcttcttcctccctctatcttgggaagggcttctcccatcgcaaattgtctcccagttatcacattcacaaaaccattgacgaatcctatgcagttatcttcgatgctggtagcacgggaagccgtgtacatgtctatcgttttaaccaacaattagatctccttcgcatt

SEQ ID NO: 83756 - DNA, 258 bp, Glycine max
  Clone ID: 700956415H1
cttctcgccactcccctcaattcacccccattctagaggcgcgtgcatttgacgacttgagtggccatgacattataacccactccagaagctcccaccctccaacccccattgtccacaagcacactaaatccaatcacaacaaccacaagaaaaagagatcagattccgaggaagatggctccgtctcttgcaacaagtgcagacctcactcccgcgacaaaatcttcatccttcccttggatcactcctccacca

SEQ ID NO: 83757 - DNA, 283 bp, Glycine max
  Clone ID: 700956416H1
cgtaagctcggccaaaaataacaaagcagaatcatcaacctatcgtgcagatgaagacggatttcaactgccaagagtcgtatacatggcacgcgaaaaacgacacaactaccctcaccacttcaaagtcggagcggttaatgcattgatacgagtgtcttccgagataagcaacgcccctttcattctcaacttggattgtgatatgtactccaataatgcaaatacaattcaagaagtattatgcttcttcttggatgaaacaaaaggccacgatatagct

SEQ ID NO: 83758 - DNA, 61 bp, Glycine max
  Clone ID: 700956417H1
ccatggttgagctctggtggattacgtgctttctctaactactgttttccacacaacatac

SEQ ID NO: 83759 - DNA, 252 bp, Glycine max
  Clone ID: 700956418H1
atttgatctgcgagtggagaagagaatcgtgatgggaggaggacacggtcacggcaccacctacaaaggagttaccgttcatcacccaaagccatggcacactatcaccggcaagggtttgtgcgcggtcatgtggttttgggtattctacagggcaaagcaagacggtcctgttgtattgggctggaggcatccttgggagggtcatcacgatgatcatggcaagggccattaagcattccttaggcatga

SEQ ID NO: 83760 - DNA, 258 bp, Glycine max
  Clone ID: 700956419H1
ctaaattcatgttatttcaattaagtttgaagtatcaatatcaaattatagagcttttgatcacgtttggttgaaaatatataaactaaaaacatatttttcacttaaattaattatcgattcatatcataatactaaacaataacttctcattcagaggggttagactagaactttataacatgcatcatcattgccatctctcttataaacttatgcattgctagtattattggactgcttataccaatacaattg

SEQ ID NO: 83761 - DNA, 250 bp, Glycine max
  Clone ID: 700956420H1
gagttttcactctctaaagaaagctttcttctctctcttttcttggcatgagaaatagtcttcaagggagtagataaagacacaaacactaaggagggaactgtttcaaatgatgttcatgttagctagccactattcaaattcaaaccaaagccattaaaaaggtgttggggaaatttaccataggttgttgagtttagatggacagttcatccaactttgagaaactctgattggggtacaaccttca

SEQ ID NO: 83762 - DNA, 257 bp, Glycine max
  Clone ID: 700956421H1
caccactccccaaaaccaccggagccatcgtcatcggcgcgggcctcgccggactcgccgccgccacccacctgaactcccagaacatccccttcctcctcctggaagcctccgacgccgtcgaggccgcgtgcgcatcgacattgtcgacggcttcctcctcgaccgcggcttccaaatcttcatcaccgcctacccggtagcgcaaaagctcctcaattattaatccctcaagctccagaagttctactccggcg

SEQ ID NO: 83763 - DNA, 255 bp, Glycine max
  Clone ID: 700956422H1
ggaagatgttaacgttggagcaaacaagttctcagaaaggcaaccaattggtacagcagctcagggtggtggtgacaaggactacaaggaggcacccccagctcctttgtttgaacctggtgagctcaaatcatggtccttctacagagctggaattgctgagtttgtggcaactttcttgttcctctacattaccatcttaactgtcatgggtgtcaacaggtcaccctccaagtgtgcctctgttggcattca

SEQ ID NO: 83764 - DNA, 253 bp, Glycine max
  Clone ID: 700956423H1
caaagctcgactgttgcaatttgtgacaggcacatccaaggtgcctttggaaggctttagcgctcttcaaggaatttcaggctcccagaagtttcagatacacaaagcatatggaagtcctgatcacttgccttctgctcatacttgcttcaatcaattagatttgccggagtatccatctaaacaccatttagaagagaggttactgctggcaattcacgaagcaagtgagggttttggctttggttgagaa

SEQ ID NO: 83765 - DNA, 252 bp, Glycine max
  Clone ID: 700956428H1
gaaatgatagcagagtccttaataaatgaccccatctttgtactgttaggatagctgagtttcctttgtcttctcagctttgaccacttggcacgctacgctacgttgcattttcaaccatcactcttttgtgttcaactagtactatataatagtggacacctcggttgttcacttgtttttgttttctcgtgtatatctcagtgttgatcttaaaggggaaaatgagttacttgggtttgggtgttagtc

SEQ ID NO: 83766 - DNA, 91 bp, Glycine max
  Clone ID: 700956429H1
gaggttgttgctggaatactatggatctaatccacaaccatggacgcaaaacgcgaactcgaagtggaagactgggaactgctaccaccca

SEQ ID NO: 83767 - DNA, 255 bp, Glycine max
  Clone ID: 700956430H1
ttttaacacaacacaagcaccaactttctttttctctttcttttagggtccttcctcactctgaatccgccattgggctgcgatggcgaagaagcgaaagtcggtggcaacgcgccttgacgaagtggatcgaacgatgtactccactttctgcagcaccgccaactccctctctcatctctacacccacgccatgaaccaacaaaaactctcatttcaggccggtgaacgacacgctcttgagaaattgtatca

SEQ ID NO: 83768 - DNA, 246 bp, Glycine max
  Clone ID: 700956432H1
gatggcggatctcctttagtcctttgtctccgttccgtcgtcaacgctacctttagatctgcgtttggccttcaggttttgaagtccgaaggagataatagaagagattcctgacatcgtaatcatttttggtgtcgtaaggcgaagggttgcttctggaagctcgtctccttggttactatgtcagtcagctcagaaaatccggtctggatccatcagtttgctgctatagtgtcttacattgtg

SEQ ID NO: 83769 - DNA, 250 bp, Glycine max
  Clone ID: 700956433H1
actagttctagatcgcgagctgccgcccttttttttttttttcttgtaggggtttctagcgttttgtttatagtgaaaggtcaaaaagaattggaaagggctgaaaaagtagaattaggacccctgtgaaatatttgatggtgcattgttcaaaagaatggcgtgtagcaaattaagcaaggctctttttcacccttagttagggggatgatttttggtaaggacttatagggtttggtttctagggtaa

SEQ ID NO: 83770 - DNA, 259 bp, Glycine max
  Clone ID: 700956434H1
tgctgatatgagaaatattgtggacattgaacaagaaagaagcttctacttgtatgatgatatgagggtagtgtttcctcaacgtcattgcgattctgatgagggcaagttacatgtggaatatcatttcccttcaaatccaaaatacttcgacatcagctgctgaaatgccgctgtctctcagtgatttttgtatatatagttgtaaatgttgtacgtatacaattcatttctttcaattctggggtgatgtgcctcc

SEQ ID NO: 83771 - DNA, 257 bp, Glycine max
  Clone ID: 700956435H1
ctgactgactacctcagggtctgcaaagtttcactaaagattagaatgtttatttgaattttgaagttttgtttgtgttgatggaagaagataatagtgaccatgaaggaagtagaaagaggaaattcactttcaaatgtagtgttacatgagtagcttaggaagctcacaaaaccactgggtggcttgcccatagtttcaaactatagcttcacattccagtccttgcataatgagtaaatgttctgtttttcttc

SEQ ID NO: 83772 - DNA, 255 bp, Glycine max
  Clone ID: 700956437H1
ctgaatttatctgagagctgaagagagggaacgagtttgtgaagtaaagttgactcagtggaaactcggttgaactcgaaatggcgaaacttgaagcgaagtagtgaatgatcgtggactcggtggggcagttcttctccggcaaagaccatcttccttattgtgactctgacgtcgtcgctggatgtgaaagagaggtattggaggctgaaaaacaatcatctgaagagcatatgcaggactgtctcctgcgtt

SEQ ID NO: 83773 - DNA, 255 bp, Glycine max
  Clone ID: 700956438H1
cttcaactctgcttcccctggcaaccttcttcttagttctctaccgcttcttatctccagattgctggggcgaaagcacaaccgttgactagtctcaagcttaactctccgatccttcaggagtctattgctaaagagatcaatgaaaatcctgaggcaggatgggaggctgctataaatcctcatttctccaattatacagttgaacaatttaagcgccttcttggagtcaaaccaacgcctaagaaggaactg

SEQ ID NO: 83774 - DNA, 252 bp, Glycine max
  Clone ID: 700956439H1
gtaagctcccaagcagtgggaggaggctcgggactctgaccgcgtgcctgttgaagaatgagccggcgactcataggcagtggcttggttaagggaaaccaccggagccgtagcgaaagcgtgtcttcacagggcaattgtcactgcttatggacccgaacctgggtgatctatccatgaccaggatgaagcttgggtgaaactaagtggaggtccgaaccgactgatgttgaagattcagcggatgagttg

SEQ ID NO: 83775 - DNA, 251 bp, Glycine max
  Clone ID: 700956441H1
cccatccaatcctcacatgcatgctgtctctgccaaagtgccaagtcacataccatttccattgttaccatactgtctttccacactacatacgaccccagctcaatcagccacacttaaaaggaaccgctcactcaccaaggatgaaattgatgcttactggaaatcaaagaagaagatagaggagagcaccttagagctatttccaccttgtcagagactattcaggctagcaaaagcacagaacctga

SEQ ID NO: 83776 - DNA, 108 bp, Glycine max
  Clone ID: 700956442H1
atttatctatcttggttctctctctcaatctaacgatttcgccattcgacagcgatcttctccgtctccactcatcgctcatcaacgctacccatttgcgctaaacct

SEQ ID NO: 83777 - DNA, 253 bp, Glycine max
  Clone ID: 700956443H1
ggtttagagagaagaaaacgttggtcggagaacattaccggaaagagaatctttgttgattccagaaatgtctagcatcgcttcctcacaccaaagcttcctcaccaacgcccttattccactaacgcacaacccaaagttcaggaccactgttactttcccttcttcactcaaaactgtctcttgcagttccccacaacatgaacatcgccaatctccaaggaagaagaatgagaacaagttagcaaagttg

SEQ ID NO: 83778 - DNA, 256 bp, Glycine max
  Clone ID: 700956444H1
tgttgttgttgttgtttctgttccttctcttgttccttaaactctttgtttcaaacatccttagaaaaggtaaaaatttaaaaaaaagaaaagaaaatggtggctgtggtttcccaagaaaatgttgcggcattggtttctcgtaccggtagggagttgcaacgttatagaaaaggtcgtcgccaagttgtgggatgcataccgatacagactttaagattgtggacgagaagtactttcccttgagactgttgtt

SEQ ID NO: 83779 - DNA, 147 bp, Glycine max
  Clone ID: 700956445H1
taaaccggatttcattgctcccggtgtcaacatcctcgccgcctggacccaagctgtcggcccgaccggtttggactccgataccaggagaaccgagttcaacatcttgtctggacacttccatgagacttgccctcacgtacagtg

SEQ ID NO: 83780 - DNA, 250 bp, Glycine max
  Clone ID: 700956446H1
cttgcatgtcgctgttggtactgttgccggtggctatggaggtggtggaggcagcggcggtggtggcgcggtagaacatggtggacgtggatatgaagaccgagctggaggacgtgcatgtgctggtgctggatacgcttcattcagaggtgtagacagtggtggcaacaagagcaatactgacaagccttatggtattaatggtggcatggctttaagggaaagagctgatgcaacttgcaggagaaga

SEQ ID NO: 83781 - DNA, 80 bp, Glycine max
  Clone ID: 700956448H1
cagatccattaggtgcgtgttgtgaattgtgtgagccaaagagagagaaagagacgaagacgaagaagaagaagacgctc

SEQ ID NO: 83782 - DNA, 256 bp, Glycine max
  Clone ID: 700956449H1
agttgctaaagctggtgcactcgtctcttacaaactgggcactggtttggttgttgctcgaagctcagatggatcatggtctgcaccgtcagcaatattctccctgggtttaggatggggtgctcagattggtggtgaacttatggattttatagttgttcttcgtgatatgaaagctgtaaagacattctgcagtcatatgcatttttctcttggtgctggttgtagtgctgcagcagggcctgttgggagagtg

SEQ ID NO: 83783 - DNA, 257 bp, Glycine max
  Clone ID: 700956450H1
cggctcgagaatctgataagcaggttctaatggatcaatatttctgcttgatgaaaaaacatgatgacatcagcaatattctcagtcacagtgaatttacatggaatgaaaccctacaaacgttaaatgctgaggatgatgtctgggatgcatacattaaggaccacccagatgccatctcatataaaaacaaatgtttgtatcttttccatgatttatgcaagatttttggaaacaaattaatggaagtatcagat

SEQ ID NO: 83784 - DNA, 256 bp, Glycine max
  Clone ID: 700956451H1
cgctcgagcgaatcggctcatcacattctctttctctcttcaacatcttcccctctcactcttcctttgccttgtctccgtgtgaaagatcacaactccaccgtcaccgatttccaaggttgagttatttgctggtctaacttaaccatactgtctattttgactcctgagattgctagtgagtcatggggcatagacatttatatagctcatctccaatgtttgagggtgaacctgaccagaactggaatcatat

SEQ ID NO: 83785 - DNA, 255 bp, Glycine max
  Clone ID: 700956452H1
gaaaaagctactgatttttcttctcatcgaggttgttttctttgctgccgttgctcttataacaatgctggcattgcatggcactcgccaaaggtcgttagtggttggtgttctctctgatatcttcaatgttatgatgtatgtctcccctcttacaattatggcaaaggttataaaaactaagagtgtgaaatacatgccattctggctctctctggctaacttccttaatggtgcgtgttggacaacatatgc

SEQ ID NO: 83786 - DNA, 253 bp, Glycine max
  Clone ID: 700956453H1
aaattctacaacaatgtcatcgttgagatcctagcaaatggtttaaaaccttttgtcactctttttcattgggactttccacaagctcttgaagatgagtatggaggattccgtagtcctaaagtagtggcggattttcgtggctacgcaaacttctgcttcaagacctttggagacagagtcaaatattgggtcactttgaatgaacccttatcatttagtctcaatggctacaatggtggcacctttgcac

SEQ ID NO: 83787 - DNA, 252 bp, Glycine max
  Clone ID: 700956454H1
gaaaaaaagaaaaagaagatcaaggaagtgtcacatgaatggtccttggtgaacaagcagaagcctatttggatgaggaagcctgaggagatcacaaaagaggagtattctgctttctacaagagtcttaccaatgactgggaagagcatttggctgtcaagcacttctctgttgagggtcagttggagtttaaggctatactctttgttcccaagagggcaccttttgacctctttgacacaaggaagaag

SEQ ID NO: 83788 - DNA, 251 bp, Glycine max
  Clone ID: 700956455H1
ataataatgggttcacaaaattgtatggataggaagcactatgttctggtgcatggggcatgccatggagcttggtgttggtataagctcaagccacgcttggaatctgcaggccataaggtcacagtacttgaccttgcagcttctggaaccaacatgaagaaaattgaagatgttgatactttctcagagtattctgcgcctttgttgcagctaatggccacaattccctcaaatgagaagttagttct

SEQ ID NO: 83789 - DNA, 259 bp, Glycine max
  Clone ID: 700956457H1
ttcggctcgaggaagaggtcctcttccaatttgaagctagcgaggatagacaagtccagttctttccaaatgctccagttgatgttgacaattcttccagctttgttgccatcaatgtcagtcctattgagtatgggcatgttttgctgattccgcgcattttcgagtgtttgcctcaaaggattgaccgtgagagcttcctccttgcacttcacatggcagtggaagctgataatccatattttcgattgggttacaa

SEQ ID NO: 83790 - DNA, 251 bp, Glycine max
  Clone ID: 700956458H1
ctcgatggcaaggtccttcaagttatgcgcccttaattctacctcagggagtggtttcagtgcctgggtggtgtgcatacagtggtcaaatggggtcaatctctacttcagacagtccacagcaagcaatgagaaacggtcaaacatatggaacttctcgtcaaggtgagcttgcaggatcacaaggggcatattctcaattccgttctggcaccgttcctgtagggttttatacattgcagagggagaac

SEQ ID NO: 83791 - DNA, 251 bp, Glycine max
  Clone ID: 700956459H1
gctctatcttcccaaaatcatataattctctttcatctgaattttccctttcaaatctcttcctttgaagttttcgtagttctctgcatcatggagatggaacgcgtcttcgagtttcctcacactcacatggatcggcgcccgagaaagagagcgagattgggctgggacatccctgaggtccccaaggctcaggtaggattgttttgtggacaagatgttgggactatttcaagctttgctccttcaag

SEQ ID NO: 83792 - DNA, 248 bp, Glycine max
  unsure (1)..(248): unsure at all n locations
  Clone ID: 700956460H1
cacagatgttggtaacataatagtgccctacggtaaccatataagcatactcagnattaaccttctgcttcatttccataacaaaaagagcatctcggtctgaacaaccatatggaacaatagttgtctctattgtgtgatcttgctttgctcttgtgaagtacattggtgcggtggacgagtcgatgccggctatggcaatgaagaagtcggttaatgctgagaatgcttatatggttaccatggga

SEQ ID NO: 83793 - DNA, 252 bp, Glycine max
  Clone ID: 700956462H1
atttttgaaggttcatcacccggtgctggaaaatttgggtacctaaaaatacgtcgtcgagctaccccaaaaaaggctaacgccatcaaggatgatggtgcactcacctcagaaaaggctaacgctagcaaggatgatggtgcagtcacgatgaagaataatagttaatcatggcttatatttaaccactttaagagttctacctttgttgtctttccccagaacatgtatagtatggttaaattttgaacc

SEQ ID NO: 83794 - DNA, 66 bp, Glycine max
  Clone ID: 700956463H1
cttttctaacttaaaaaacactaaaaaagggcggccgcgatacttgcgctgttggcccggggaatt

SEQ ID NO: 83795 - DNA, 280 bp, Glycine max
  Clone ID: 700956465H1
cgcacttcggctcgagcacgcttgtttacacaacgcaagccattgtccgttgtattcgatggactacgatttcagaagcacgttccggcccaacacctcacctgtaccgtccgccaccgccaccgtcaccgatgtaccgtccatcaccgtatcaacagaatcctactccttcttcaggacttggcgttagggttggtataaagccggaatataggatcacaccgccgcctcatttatcatcacttgctggagataatccacggagcaacttccaatttga

SEQ ID NO: 83796 - DNA, 81 bp, Glycine max
  Clone ID: 700956466H1
gtgatccggtgcgtccctccaaaattgaggcagaaagaggatagaagtgatatgaggtcctcttttatccatccatccaca

SEQ ID NO: 83797 - DNA, 86 bp, Glycine max
  Clone ID: 700956468H1
caacaccagaggcagaggcagagagaaacagagagagaaaggagtaacaaatagttgattatttcaaagacaatgaacaataaaga

SEQ ID NO: 83798 - DNA, 259 bp, Glycine max
  Clone ID: 700956469H1
cttattttatctattctctctctttcttttgtgttctaagcagctagaagcaatggagaggaaaagaagccatgcctctttcaccatgtttgcacatgcttgttggagtgatctttcagagccttgtcattcctgtagtatccaccactgttgaagatcagaagaactactacaccccagatccacatgctggaagtcccccctcaggctcacacagtagtactcctccatctcatggccatggaagctctccaccctc

SEQ ID NO: 83799 - DNA, 257 bp, Glycine max
  Clone ID: 700956470H1
ctttctctcttctctctccacccaaaccctaactcccgaccctgttcccctctcgtatccgtcatgaaaggaggaaagtccaagaccgaatctaagagagccgatcccaaacttgctgtgaataagaagggagccgccaccaaggctaggaaacccgccggcaaggggaaggcagcgaaagaccctaacaagccaaagaggcctccaagtgctttcttcgttttcatggaggagttcaggaaggtattcaacaaaga

SEQ ID NO: 83800 - DNA, 255 bp, Glycine max
  Clone ID: 700956471H1
atgaaactctgaaatgagatcaaaataacataacacaaaacgcaaaaccctaatctctgcaattcctgtgcgtggaaaggttcgagaatggtttcgctggaggaatctcgctcgaattcgagccgtttccccttggcgaggagttaccagtaccactcctcggtttcgtccaaaacgcagcgtcaaattggaaggtccatgcgcactatacgctccaatttcttccaagacgacaacagttctagctgctccttc

SEQ ID NO: 83801 - DNA, 245 bp, Glycine max
  Clone ID: 700956474H1
atgatttggaaaggctttctgtctctgattacaacaatgttaatggttttctatcatatactggttcaaattcaacatctgatgctcagcggtcattttttgactttgaggattcccaggatcaagtcttctcaccacctttgctaatggactcatcacttttcacagatccatttgaagacttgctggcccctctctccgagactgaaacggccttgatagaccattgaaaattttctgggcaa

SEQ ID NO: 83802 - DNA, 251 bp, Glycine max
  Clone ID: 700956475H1
gatggatcagtttttgtggagggtgttgcctttgcttacaatccttgtttcctttggagtgttcttctacttgcaggattcttacacagcacagttatcttcctctcataaagttaccgcgggataagtgcagccttcttccccatcgccacttctggatatccagcaaacgtattgtgaccccacaagggatcatttctggttcgctggagataaatgatgggaaaataatatctgttcgttgagggaca

SEQ ID NO: 83803 - DNA, 251 bp, Glycine max
  Clone ID: 700956478H1
gcattagcaaaagcaagaagaactagtctaagcagaaatggcctcttcagtgatggcatctgtggccctcaaacctgcccctttcactgttgagaagtcctcagttagaggccttccctccctctcaaggaactcctcttcattcagagttgtggccagtggtggcaagaagatcaagactgacaagccttatggaattaatggtggcatggctttgagggaaggagttgatgcatctggcaggaaaggaa

SEQ ID NO: 83804 - DNA, 257 bp, Glycine max
  Clone ID: 700956480H1
ccagtagccgagattccgtgagttgcaaaaatgaagacgattctttccaccgagaccatgaacatcccggacggcgtgagcatcaaagttcatgccaaggtcatcgaagttgagggcccccgcggaaaattggtgcgagacttcaagcatttgaatctcgattttcagctcattactgacgaaaacggtaaaagaaagctgaaaatcgacgcgtggtttggttctcggaaaacatccgccgccattcgcaccgcctt

SEQ ID NO: 83805 - DNA, 263 bp, Glycine max
  Clone ID: 700956482H1
gttggaaagctcacaggcttggcactcgatgtcgtgtcagggattacacacattctccagtccttggacttggaccttgctctcaagcccgcctctcgtcgccttcttgacgttgatgatgatggcttccccacttgggtctcctctgctgatcgcaagctcttggccaacgatcctgttttgccccatgctactgttggcaaggatggtagtggtcaatttcatactgttttggacgctattaactcctaccccaagcatca

SEQ ID NO: 83806 - DNA, 258 bp, Glycine max
  Clone ID: 700956483H1
tcccaatttatgtaggtcccatccatcgagtgtggatgccagataatatttaaggcgcgtttatataaaaaaaaaaaaaaaaaaaaaaaaaaaaaaaaaaaaaaaaaaaaactaaaaaaacaaaaaaaagaggggggcccccccctttttggcctcccccccccgggtttttttttcggggggttttttggggggggccattttttcccctaggggggtttttttatgtctgggggtcttcctgggcattattttttt

SEQ ID NO: 83807 - DNA, 260 bp, Glycine max
  Clone ID: 700956484H1
gtgagtttgttgatcgagataactagaaacagtgtgatgaaaatgaaggtccttgttttcttcgttgctacaattttggtagcatggcaatgccatgcgtacgatatgttccctctccgaatgaacactggctatggtgcccgtactccggaggtgaaatgcgcaagttggaggcttgctgtggaagcacacaacatctttggctttgagaccattcctgaagagtgcgttgaagcaacaaaggaatacatccatggcga

SEQ ID NO: 83808 - DNA, 259 bp, Glycine max
  Clone ID: 700956485H1
ttccgtctgccttcttggatgctataatggatgatgttctcaactctgcagatgccattacctgcatcccccagtgtttggatgccttatgcttaaatagtaatggcctgcaggctgtgaaagatagaaactctctgaggtgttttgtgaaagtgtttacttctagaacatatttgcgtgctcttgcaggggacacacctgcatctttgtctagtggactggatgaattaatgcgccatgcttcctcattgcgtggccc

SEQ ID NO: 83809 - DNA, 257 bp, Glycine max
  Clone ID: 700956486H1
ctcccgagtatgtaaaagctggtcaactcaccttgaaatcagacgtatacagtttcggagttgtcttgctagagctcataactggacgaagagccattgacacctcaaagccaaacgaagagcagaatcttgtttcatgggcaacacccttgttcagggaccccaagagatatcctgaaatggcagatccacttcttaataagaacttcccagaaaaagatctgtctcaagttgttgcaatagcatccatgtgctta

SEQ ID NO: 83810 - DNA, 247 bp, Glycine max
  Clone ID: 700956489H1
gaagaggtcctcttccaatttgaagctagcgaggatggacaagtccagttctttccaaatgctccagttgatgttgacaattctcccagctttgttgccatcaatgtcagtcctattgagtatgggcatgttttgctgattccgcgcattttcgagtgtttgcctcaaaggattgaccgtgagagcttcctccttgcacttcacatggcagtggaagctgataatccatattttcgattgggttaca

SEQ ID NO: 83811 - DNA, 250 bp, Glycine max
  Clone ID: 700956490H1
cagagatggtagctattggctttggagcccctccttctccacttccgtttcatcttcgcctggcttcctctccttctcctttggccttcccaataatccacaaattccaaaacgcaggcaagtcagtgataacaatctgttcaaagaaaaatgcaaaatcaagggtggtcactctctgctctgcacctgtgcaagagcaggaggttcgtgatattactttgagagagagaagtgtttcggttgtcctatt

SEQ ID NO: 83812 - DNA, 249 bp, Glycine max
  Clone ID: 700956491H1
cgtgagtccttaagaaaagccctgaatcatcctgacggcaacagcgttgggagcaaagatcagcagaagctctacgagcttcagcagaagatcttttggcagaagcaagaggtgaaggatctaaaagaaagatctttatggagcagaagcttcgacaatgttgttgtactcctcgtaaggttcagcttcaccgttttagcaaggattaaggttgtcttcggaatcggtcaccacatgccttgtctgtct

SEQ ID NO: 83813 - DNA, 251 bp, Glycine max
  Clone ID: 700956493H1
ctgtaaccatggcatccaccactctatcccctacaaccccttctcagctatgctcaggaaagagtgggattttcagtccctcacaggcacttcttgtgaagccagtgaagaggcagatgatggggaagagcaagggaatgagaattgcatgccaagccaccagcattcctgctgatagagtccctgacatgggcaaaagacagctcatgaatctgcttcttcttggtgccatttcactcccctctgctgga

SEQ ID NO: 83814 - DNA, 253 bp, Glycine max
  Clone ID: 700956494H1
ctcaatcatccatagacatggccaccgtcacttctgcagcagtttctattccctcattcactggcctcaaggcaagcgcaggcaaagtgagtgccgccgcagttaaagtctcagctccccaagccacaaggttctgcggcatcaaggcttccctcaaagacgttggagtcgctgttgtggccactgctgcgagcgcagttctagctagcaacgccatggccattgaagtgttactgggcactgatgacgggtc

SEQ ID NO: 83815 - DNA, 255 bp, Glycine max
  Clone ID: 700956495H1
gttgttttcaagtcaactcaatggcacttccctcaggtttagtttccatgttgatagtactttttggtatggttttggtagttggggttgaggcaaaggcaagggctttctttgtatttggagactcactggttgacagtggtaacaacaattacttagcgaccactgcacgggctgattcccctccttatggcactcactatccaactcgtagaccaaccggtcgtttctccaatggcctcaacattcccgatc

SEQ ID NO: 83816 - DNA, 258 bp, Glycine max
  Clone ID: 700956496H1
taacccaccattcctttcacttccacaccccaacactctctaattccataaccaaccttctcataatccacgcaacaacgttcttctgccacttccctcacggtctcaacgctgctacattcgagccataagtgacgcaactgtggaacctgaaatttctaagaaagaacaaaacgagtcacctaaagattggaagattaaaatgctctatgacggagattgccccctctgcatgcgcgaggtgaatatgctaagaga

SEQ ID NO: 83817 - DNA, 257 bp, Glycine max
  Clone ID: 700956501H1
caaagccttgaccatgaaagcaacccctttagtgctcttcctcctcttcaccatagccaaagggcttcacaaccccaaatgtgatgctacccatcaacatgaccatgatggctcaaccctccaagtgttccatgtgttcagcccatgttccccatttaggccctcaaagccaatgtcatgggaagagagtgtcctaaagctacaagccaaggaccaagccacgatgcagtacctttctagcttggtggctaggaggt

SEQ ID NO: 83818 - DNA, 246 bp, Glycine max
  Clone ID: 700956502H1
tgcgaccttcccaccatcccctttccatattccgttattattatcgttttctctcatgttctgacaatttctcttgtgctttctctaatggcggttgcagccttcaaatcctcttcgcgaagagcaaactagtcttccgcaccttcgaacgcgtctccgaacacgacgtcgtcctctggcagatcctccaccatagctccggactcgactcgcatgtcgacgagcgctgacgcgttctccaggggc

SEQ ID NO: 83819 - DNA, 242 bp, Glycine max
  Clone ID: 700956503H1
ttttgaagaagaatcagtaataaacatcttaatttgcatagtagtcgcagctccatattcccaatgtccctcacctctccatttgtccatggaacgacaggagatcagacctcctgtgatgtctgtgccataatttggtgggcgggaccaagatgaaccaggaactctcgactatacagcgagggacactcaagctcgtgataagagatcgcatcacaacgccaatctgcgtggaattcgaa

SEQ ID NO: 83820 - DNA, 257 bp, Glycine max
  Clone ID: 700956505H1
acttttcctgtgaggaaaagaatgttcggtcgtgcttggcccctacgagctctcatgagagatggaattgtaccaacttggccacaactgatgaatagtaaatctgctccaccatgcacggacgatgaggttgcaaattcatggttaaacaatgaagcagtcaggacagcaattcatactgcacagaaaagtgtggtcagtagttgggatttatgcactgacagaatttacttcgatcatgatgcttggagcatgat

SEQ ID NO: 83821 - DNA, 243 bp, Glycine max
  Clone ID: 700956506H1
aactcacttcaatttctttaccttatatatatctatccaattaaccactcttatatttagaatccaaaaatctctcgtcgttcaagaaagaagcaccacaaattaattctcgtttcccattcccatccctatgccaactattttgcataggattttccttctttacaacctcgtacatacattcctcctctgtgtggtccccaagatggtgcgtcgctgcctcatgccttcttggtaccaaat

SEQ ID NO: 83822 - DNA, 261 bp, Glycine max
  Clone ID: 700956508H1
attatcctaagtctttgggaatagtgctgcaatggcttcaagtcaggaggaggtgacccttttgggagctactggaagcccatttgtgtgcagggttcatattgccctcaagttgaagggagttcaatacaaatatgtcgaagaaaatttgaggaacaagagtgaactgcttctcaaatccaacccagttcacaagacggttccagtgtgtattcacaatgagaagcccatagcagagtctcttgtgacagttgaatacat

SEQ ID NO: 83823 - DNA, 180 bp, Glycine max
  Clone ID: 700956509H1
gtaaactgttacaattcttaccaaaaagaagcatgtttttccctatcatgctttaagtgtttaataatcctatcatgctaagtgtttaataatgtaaagatttttacattgttgactaataagaaattatcctacatatgactcttaaaataattattacaaaagtcaataattttcaat

SEQ ID NO: 83824 - DNA, 262 bp, Glycine max
  Clone ID: 700956510H1
gttgaaagtcattaactatgggaatgatagaggaggttgaaaacgaaaacggagacctaaacgacgccgttcttgttccaccccctaacttctccatggtcgaggactgcattttccgatccggcctccccaacccttccaatttcccctttctccaaaccctaaaccttcgttccatcatatacctgtgccctgagccttatccggaagaaaatctggacttccttcgttcgcagaatattcgcctttttcaatttggaat

SEQ ID NO: 83825 - DNA, 261 bp, Glycine max
  Clone ID: 700956511H1
gaaggaagagacttcaacttcagttcagttgtgttgtctgacaaaacgaacagcaattgcgagcagatgcaagatccatcttcaaaccctaattccaatccaaatcccaatcctcacaacgccaatgccgcatcccagttaccgcgtccgccgcaggacacggcgtccaccgccgtcgccggcgccttctcgtcctctctattcgcgcgctccggcggacctcaccaccggcgagcccactcggagatgagtttccggctg

SEQ ID NO: 83826 - DNA, 235 bp, Glycine max
  Clone ID: 700956512H1
gtaaaattgagccacttgtgagtagaagcaagggtgagaggaagactcactatggtaagggtggaagtgatgggctgaggaagagattttcgttgagactgcggccaaggttacggttattggctatgagaatgaaaagggcttccattaggtccattttgaatgaagtggggatctttattcgtaagaacattagagcagtgacattttctgcttcaatttctaccgtgttctg

SEQ ID NO: 83827 - DNA, 60 bp, Glycine max
  Clone ID: 700956513H1
gttactccgtctctcgtggattcggatctcgagtctgatctcacgcttcagatctcggtg

SEQ ID NO: 83828 - DNA, 72 bp, Glycine max
  Clone ID: 700956515H1
ggcccgtcttctatttcaacttctcgcgcgatagattgcgctgttctccttcgctcttccctttccgattcc

SEQ ID NO: 83829 - DNA, 259 bp, Glycine max
  Clone ID: 700956516H1
gtcaacacaacagttgcatatcaccgtttatcctatcccagcaagaactatatcatgcattttctgacaaattcaaccaatctgaattaaattcacattcacatcacgctgcattctttatttctccaaattttcaattttaataatagctaactaaatgaccagaagatgagtttaggacatattttgtatcattaaattccaacattatattacttttccttacttatctaatagtaattgtgtttcaacaacttca

SEQ ID NO: 83830 - DNA, 250 bp, Glycine max
  Clone ID: 700956518H1
aaatagttgagttgacggaagttgaaaattttggttgagcaagagccttctctttgttccgttccgcgaccatgtcttatgagacatgcccttccgtaaagaacttccttcttttggattctgatgggaaacgtgtcgcagtcaaatacttctctgaagactgggcaacgaatagtgccaaggaaaattttgagaaagttgtcttcaacaagactcagaagaccaatgcccgcacagaagcggaaatagc

SEQ ID NO: 83831 - DNA, 258 bp, Glycine max
  Clone ID: 700956519H1
gggagagttcagttccagcaggaggtggaagtgctgagttgcataaggcatccaaacatggttcttctgctgggtgcgtgtccagagtatatgtgtctggtgtacgagtacatggccaatggaagcttggacgactgtctgttcccaagaggaaaatcacggccacctctcccatggcagctgaggttccaaatcgctgcagagatagccacaggtctccttttccttcatcagactaaaccggagccactggtccac

SEQ ID NO: 83832 - DNA, 256 bp, Glycine max
  Clone ID: 700956520H1
atcagagctgattttcgcggctgttaccggtcaccggagattctatcctaaatcgttttccgatgacgataaaaactgttaaagtcagtaacgtttccttgggagcaactgagcaagacattaaggagttcttttcattttctggtgatattgcatatgttgaactacggagccatgatgaacgatctcaaatagcttatattaccttcaaggattcacagggagctgagactgcactactgctttcaggggcaac

SEQ ID NO: 83833 - DNA, 222 bp, Glycine max
  Clone ID: 700956521H1
attataagaacttctatcccaaggataagaaggaagttccgaagaggaatgacaagaaacatgagtacaaaggtagaacatcaaacacttttgtgcacaccctatttttttctaaattaggaagctttcatggcaaattgttggaatatggtggtggctactggtgtaatgagtaaactggaggtttgagcatgcctagagttaccattttccacacaacat

SEQ ID NO: 83834 - DNA, 76 bp, Glycine max
  Clone ID: 700956523H1
ttcttgtgtttattgtgtctctcaatgagagactgtaatggaaaaggatcatcaaagtcagtccacagaacatagg

SEQ ID NO: 83835 - DNA, 220 bp, Glycine max
  Clone ID: 700956524H1
gccaagtgaaagtgagataaaataaaaatcaaagagcataatgtcagggatcattcacaagattggggagacccttcatgtgggagggcacaagaaggaggaggagcataagggtgagcaccatgctggagaatacaaaggggagcaccatggtgaacaccgttttgagttcaaaggctatcattatggttcccacagagctggaaagtaccattgtgag

SEQ ID NO: 83836 - DNA, 261 bp, Glycine max
  Clone ID: 700956526H1
tggatgttggtcttgggtttgcatcattagattctgatactgctggtgcttattttagctggctgctaaaatacccatcagcacttacatcttttgatcaaatcacaaactatgcaaaagggaaaagaattgcgttgtttatggattatgatggaactctttcaccgattgtggatacatcctgactgtgctttcatgtccgacaatatgcgtgctgctgttaagaaggtggcagaatattttccaacggcaataattagt

SEQ ID NO: 83837 - DNA, 259 bp, Glycine max
  Clone ID: 700956527H1
ggggtagatacatttcttctatttctatgcctatctcttcccttgtttttgtcgtccttcttcaaataccgtacaaccttcaagaatccaccacttccagcaggacctagaggacattcccataatagggaatcttcatcagctagatagtccttctcttcatgagcagctatggcatctctcaaagtaatatggtcctttattttcccgtcaatttggattaaggccagtcatagttgtttcctctccaaaattggcc

SEQ ID NO: 83838 - DNA, 250 bp, Glycine max
  unsure (1)..(250): unsure at all n locations
  Clone ID: 700956528H1
cttcatctgaaacctgccagggtaagatcttacttgagaatagcactgcttgcacagaagttacaatatgatcacacaagnacatgaagaacgaactagaacgaagtttantgaatttagtggctgttgtggcattgggtctggatataatgctgggcgttaaggacatagttaagaacaggaggaatgctgctaagtagaatagttcagtggatgtagagtgcacatggcaagggtaagaagaagcaat

SEQ ID NO: 83839 - DNA, 248 bp, Glycine max
  unsure (1)..(248): unsure at all n locations
  Clone ID: 700956530H1
ctacattttgtgcgtccgtctgtgtgcaaacaaggtaacatctttcacacaccaagaatcttagccatggctgcttgctcangtattctcttttgctccttttctttctctttggattctccgcagctaatgaactattggttggaggcaaaatagatgcttggaagattccatcttctgaatcagattccctcaatcaatgggctgaaaggtctcgtttcagagtcggcgatcatcttgtgtggaaa

SEQ ID NO: 83840 - DNA, 114 bp, Glycine max
  unsure (1)..(114): unsure at all n locations
  Clone ID: 700956531H1
tcgcacgcgngtacgtgcgctcggaacgccgcgcggggtcacgactcgaacatcacgatcggctcacggctcagtcgacgtgaccactcgctagcgcgtaggacagggcgggca

SEQ ID NO: 83841 - DNA, 265 bp, Glycine max
  Clone ID: 700956532H1
attcggctccagcggctcgaggatctttgtttcaacaaatctacatttcatgctgtaattgtagtttcccatttcacccttatctctctctctatccatagtacctttcctcctttcctcatccctcgctctctgtaataaataataattattaccaactcttccgccattggatctgctcttccttccccttctggcaaaaagggtcagtctgctactgggattacatttttccttataattttggaggcgtgctgctgcttgg

SEQ ID NO: 83842 - DNA, 184 bp, Glycine max
  Clone ID: 700956533H1
cagactcttcagttcaaaacgacaagaagctgtggccgtttaagatcgtggctggccctggcgacaagcccatgatcgtggtaaattacaaaggcgaggagaagagattctccgtcgaagagatatctgccatggtgttgggcacgatgtggaaagtcgcaaaggcgattctatgggacgccgt

SEQ ID NO: 83843 - DNA, 253 bp, Glycine max
  Clone ID: 700956534H1
ctttgttcactcttcttctcatgcggctagggtattagcgcacgtcttctagatttaaggaagatgggtaaggaaaaggttcacatcagtattgtggtcattggccatgtcgactctgggaaatccactaccactggtcacctgatttacaagcttggaggcattgacaagcgtgttattgagaggtttgagaaggaagctgctgagatgaacaagaggtctttcaagtatgcctgggtgctggacaaactta

SEQ ID NO: 83844 - DNA, 254 bp, Glycine max
  Clone ID: 700956535H1
ccatgaagcagctatctctttatcggacgatttcaagcctatgcttcccaatctaaagatagatacttgttccttaattattgttaacctgaattggtttcattcaatctcttcctaatatcatgtagttcaggttgtcttttcaaggtgtgaattaccattctcagttgataatcttgagaatttaaaggtggtgataggcgatgaagagacagctgcttcatgcgaagatttcaagcctatgcttcccaatc

SEQ ID NO: 83845 - DNA, 256 bp, Glycine max
  Clone ID: 700956540H1
cgcataactcgcccaacggaatccaggggcttcttcagtactttaacctagtggagggatgcctaacgatgataaaatcacaccaacagaagaaaaacttcacgtacgattggataatccgaacacgtgttgacgggtactggaacgcaccgttgggttccgtaaacttcgttccgggaaagtacctggtcccagcgggctcctcgtacggtggactcaacgaccgtttaggaatcggcgacctaacagcctcgac

SEQ ID NO: 83846 - DNA, 258 bp, Glycine max
  Clone ID: 700956541H1
ctaattctatataagcaaccttctccagcaattcttctaccacatcaactcatcaagggttgtgaaagcagagaagtgagatacactaagttatcctcataaatacactctaattaggtggcaagataagtgtctaaccttagtaacattgccacatattgtgttcattttggaattgtgccactaaaattctattcaattcatccatggctgcctcttcttatgctatgcaatcaatcctggcaaaccctttgatcc

SEQ ID NO: 83847 - DNA, 257 bp, Glycine max
  unsure (1)..(257): unsure at all n locations
  Clone ID: 700956542H1
tccacttccacattgcatatgacccacnanatcttcgactatagctatctttcattctctctctagctacttacaaccactgtatattctacgcgcgcgctttcgatcgatgctattatagtgttccctacctaccttatggctcctctcttcatctcaatgcaaatgcttcttctggatttcacttgcatattattgcatgtcacatgcccagattaccacgacaggacccccaatacagtgccttctacaaactc

SEQ ID NO: 83848 - DNA, 253 bp, Glycine max
  Clone ID: 700956544H1
agagaacattcttgtggggtaggtactctttggaaatgtctgctgttatttacaaggattgggcttacaccgatcaagcattgcctaatgatcttgtcaagagaggagttgctgttaaggatccatctgctccccatggagttcgacttttgatcgaggactatccttatgcttctgatgggctagagatatgggatgctatcaagtcttgggtggaagaatatgtctcattctactacaagtcagatgagga

SEQ ID NO: 83849 - DNA, 254 bp, Glycine max
  Clone ID: 700956545H1
agatgactacccttatgctgttgatggactagagatatggagtgctatccagacatgggtcaacgtctacgtctccttgtactatgccacggatgatgcagttaagaaagactcagatctccaatcttggtggaaggaagctgttgagtacggtcacggtgacttgtaaagacaagccatggtggcctaagttgaactctctctcaagatctgattcacatttgctgcattattatatggactgcttcagcact

SEQ ID NO: 83850 - DNA, 252 bp, Glycine max
  Clone ID: 700956546H1
cttgtatggtgggagtcatgaaattaattttgtgatttttatataagctttatacgtgtaacattgaagtgtgtgtaaaatcctttatttcgttatgatgatgtattgagattgaaattatgaggtgcatgtaattaaagcccttcatatgttggaattgctttgaagtagtgaagttcttcctctcactttaaaaaaaatcaaaaaaatgggaggccgcggattagtgtatacgatgacccgggatttaat

SEQ ID NO: 83851 - DNA, 263 bp, Glycine max
  Clone ID: 700955908H1
caaaatggccgtgacggaggaaaccggcggcgccaccgtgatcgacgagacctacgagttctccgcgccgcgattcttcgatttcgtcaaaggagagtctgatgaggaatcgcgtaaggctgagctctggttcgactccgctctctcctacgctccttcgccattcatgcctaaaatcaagaccggtagatctattactgtggataccttgtgtgattttagtgaagctgacaaaatgcagaagatgtttgttagtgttgata

SEQ ID NO: 83852 - DNA, 261 bp, Glycine max
  Clone ID: 700955909H1
caagacctcttgcttcggctcacttttgacaacatatgcggcttggctttcggccaagacccgcaaaccctagccgtggggctcccagataacgctttcgctctctccttcgatcgagccaccgaggccactctacaacgctttattttacccgagatcttgtggaagctgaagcgatggctcaggctcggaatggaagtgagcctgagccggagcctgaaacacatcgacaattacctctcccacatcatcaagaaccgc

SEQ ID NO: 83853 - DNA, 261 bp, Glycine max
  Clone ID: 700955911H1
ccaaaacgctccatactcgatatagcttacaccacttgggccatcaaaccccaaccaattctaaccatttcttttcgttccgatcagtttttcgtctctctctgttttccgaaaccttaatctcttgcccgataagggaaaattatgaatcccgataagttcacccacaagacaaacgaagctctggtgagtgcccacgaaatagcaacaagcaacggtcacgcgcagttcacccctcttcacctggcgtcctctctgatt

SEQ ID NO: 83854 - DNA, 258 bp, Glycine max
  Clone ID: 700955912H1
ataggattctcttctttattccttttgtaatttcattcattcttaatctttgtgaaaaataatgttcatcgagaattttaaggttgagtgtcctaatgtgaagtacaccgagactgagattcagtccgtgtacaactacgaaaccaccgaacttgttcacgagaacaggaatggcacctatcagtggattgtcaaacccaaatctgtcaaatacgaatttaaaaccaacatccatgttcctaaattaggggtaatgct

SEQ ID NO: 83855 - DNA, 258 bp, Glycine max
  Clone ID: 700955913H1
cacatcctctctctcttcataacatttccaatccatccaacatattcttcagttagctcccccaacctatacacttcaccaccacaccacaaccctaccctctctctctgtcatggtcattggaggagccttccctcgtttcgacccaatcaccaaatgtagcacccaagaccgctccaaccagaccatcgcctcggacctcgatggcaccctccttgtctcccggagtgccttcccctactacttcctcgtcgccct

SEQ ID NO: 83856 - DNA, 253 bp, Glycine max
  Clone ID: 700955914H1
gagaaaatgagttcccagattgtggcccgcatattggtcaaggctctcatggcaatgccggcgccagatttcagcctttgtctctttttgattccagaacgcgtgcaaatggaggagcagttcaagactttgattgtcctgtctcactatttggagacaggaagatttcggcagttctgggatgaagcagcaaaaagtcgtcatatagttgaagctgtgccaggatttgagcaggcaatccaaggatatgcaa

SEQ ID NO: 83857 - DNA, 255 bp, Glycine max
  Clone ID: 700955915H1
tatgactttgactatgatgactttaacaggtaaattgcctctacacatttttattttttattttctattttggtcattcattttgttggttctgctccctgttcctctactagtagaacctgcaagatcaatacaaaaacagaaaacacagcaaagcaacaagcaaggatctacaccatgagtttatgtggttcagcaatgtgcctacatacatgagaaatgacagctcatcatcatcacattgatcatgaaaca

SEQ ID NO: 83858 - DNA, 256 bp, Glycine max
  Clone ID: 700955916H1
cgtatctattctttgcgtttggtttttggttgattgaaggcattcacagcgtaattcgttgctgcattttaatcgatttatctaaccaggactgaatgacctaatggagtctaaaggtgggaaaaagaagtctagtagtagtagtagtaaatcaattttttacgaagctcccctcggatacagcattgaagacgttagaccaaacggtggaatcaagaaattcagatctgctgcttactctaactgttctcgcaaa

SEQ ID NO: 83859 - DNA, 266 bp, Glycine max
  Clone ID: 700955917H1
cggcttatcaatatgatcaatgaactggcatcaatatttgaagttgttactggtgcagcaaagaagccagttaaggaagagtcttcagtttcacaccgcagtggcagcaagtctaagtcgagctctaagcgagcttcggaatctcatggtagacagccagagccattgcgatcataagatgaggatgaagaactggacgatcaagatgacgatgaacatggagagaccttgtgtggggcatgtggtgaacattatggcactgatga

SEQ ID NO: 83860 - DNA, 266 bp, Glycine max
  Clone ID: 700955918H1
acaagtgtcgtgctgctaggcgaacagcagagaatgctgcaccctagatggcgagagtccagtagccgaaagcatcactagcttacgctctgacccgagtagcatggggcacgtggaatcccgtgtgaatcagcaaggaccaccttgcaaggctaaatactcctgggtgaccgatagtgaagtagtaccgtgagggaagggtgaaaagaacccccatcggggagtgaaatagaacatgaaaccgtaagctcccaagcagtgggagg

SEQ ID NO: 83861 - DNA, 265 bp, Glycine max
  Clone ID: 700955919H1
atgaatatggagcgctacacgctacccgcaccacccattaatattattctcgaggaagaagaagaagaagagaacattgccattgccatgggtgcccctcttatcccttcctttaaatccatgcttcaacaccaacaacaacaacctgactcttacttcaacttcaactttaactcttcaattagttctgctaccataccctttgttcctaacatggaatcttttccttctcttgaccctttctccccttcactttcatcacttc

SEQ ID NO: 83862 - DNA, 259 bp, Glycine max
  Clone ID: 700955920H1
actaaatgcaaggaggttcaaaaaattgtatgctgacaaggaagatatctttgttcctgatgttttctgggactatacaagtgctaaagtactaacaatggattgggttgatggggtcaaactaaatgagcaagaagcaattgagagacaaggattaaaagtcttggatctggtaaatgcaggcatacagtgcagtctcagacagttactcgagtacggatattttcatgcggatcctcatcctgggaatcttttggca

SEQ ID NO: 83863 - DNA, 264 bp, Glycine max
  Clone ID: 700955921H1
cttaagagatcaatatggccaccaccactacccagcctccctctaatatctgttttttccttctgttgttgcttctagcacactttcatttgggcataagccaacttgagctgaattactactctaaaagctgcccaaaagctgaagagatcatcaaggaacaagtcacacaactatataacaagcatggaaacactgccgtttcgtgggtcagaaatctcttccacgattgcgtggttaagtcatgcgatgcatcattactgt

SEQ ID NO: 83864 - DNA, 252 bp, Glycine max
  Clone ID: 700955922H1
gatcatgaaattgacatggtagctgctctcctagctgagattgagtctggccacatccatcaatccagcagggatttcctttggtggaagcctgaccctaatggtctattttcaacaaagtttgcctacaaagtgttgcaggaggctcataataatgctaatgaagacagggcctccaagattatgtggagactgaaaattcccccaagagcgagtgctttttcttggagactattcaagaacaggctccct

SEQ ID NO: 83865 - DNA, 256 bp, Glycine max
  Clone ID: 700955923H1
ctaacactatagtactactctttttttcttgcctgaagtgaaggactaatggacagatttcatgaggaagaaattgaagagccagtgagtccaacagggcaatacttgacaagctcttcactaagtgtgtacattcttggtgtcttggaaagtgaggttcccattgatgactctcaaaccgtgccacttcttcagaatctcttccttcccatcaactcacgtttctcctccatcatgattagggacaaaaatgggg

SEQ ID NO: 83866 - DNA, 263 bp, Glycine max
  Clone ID: 700955924H1
cacacaaacaccctttgagttcattaacctcttcagaaaaaacaacaacaacaacaaaaaaaaacatcatcatcaaaaaaacttccgagagtttaatggcaacacgcgtgatccctccaagaatcctcaagaagctccgttacaacacaacaaccaagccactcaacgctgcccacccctcaatctctccagtcatcgccccaccgtcactcttcgagaggtcgccgtcccctgtcgcggatgctgtttcaacaacatccacg

SEQ ID NO: 83867 - DNA, 260 bp, Glycine max
  Clone ID: 700955925H1
ccataggtgtggtggtggccgtcaacaagaacggcgacgatcccacacttcaaatctcaggaaaaatcagtaggggttatctgccaaaacactgatgaccagaagctctgccacggaaccctaagctccgtgaagggcatggacaccgctgatccaaaggcttacatcgccaaggcggtgaaagccaccatggacagcgtgaccagggccttcaacatgagtgataggctcagtaccgagtacggagggcaacgataacg

SEQ ID NO: 83868 - DNA, 236 bp, Glycine max
  Clone ID: 700955926H1
ggaaggggatcacgttattattggtcaatgcaggcctctctctaagacagtgaggttcaatgtcttgaaagtgatcccagctggatcttctagtggtgcaaagaaggcttttactggaatgtgagcttcgatttccagtttttattgaagaaaaatgttaccttgttatttagtagatctgatttcttttctggaaggtgacatattaaaaccttatcaattttggattttctttg

SEQ ID NO: 83869 - DNA, 257 bp, Glycine max
  Clone ID: 700955927H1
gtttctttctcttctcttcctgcaaattcaaaacccaatctcaatcttttcctttcgttccatttccttcatttgaaattgaccacacccacgcagatcccaaatttccaactcgtaaattatccgccttttttcccattccgaggaaagaagccaatccacgaccgatccaatgccgctttgaatcgcgtgccgtcctccttccctgggaacatctttttgctttttgaattcgatatttggagcagttgggtcga

SEQ ID NO: 83870 - DNA, 257 bp, Glycine max
  Clone ID: 700955928H1
cacacacatactaagaagcaacaattcttctacaatggatctcctccttctggaaaagaccctcataggtctcttcctcgctgcggtggtcgccatcgccgtctccaccctccgcggccggaaattcaagctcccaccgggcccactccccgtcccaatcttcggcaactggctccaagtcggcgacgacctcaaccaccgcaacctcaccgatttggccaaaaaattcggtgacatcttcctcctccgcatggggc

SEQ ID NO: 83871 - DNA, 256 bp, Glycine max
  Clone ID: 700955932H1
gcacttagaaggttgaggactgcttgtgagagggccaagagaacattgtcatccactgcccagaccaccattgaaattgattctctctatgagggaattgatttctactccactgttactcgtgccagattcgaggaactgaacatggatctctttaggaagtgtatggagccggtggagaaatgtttgagggatgctaaaatggacaaaagaagtgttgatgatgttgtccttgttggtggttctaccagaattc

SEQ ID NO: 83872 - DNA, 269 bp, Glycine max
  Clone ID: 700955933H1
tttcttacctcttggcatggccattcaaatgtcttcttttgtctttgtttctcttacaattttattttgcttctcttccttggagaagagttttgcctttcaaacaacaaaggaggtcacagaaagcaacaatcttcatcaatatactcatcttgttcacctcagctcactccttccttcatcttcctgcagctcttctgccaaaggtccttaaagaaaagcatcattagaagtggtacacaaacatgggccatgctcccaactgaata

SEQ ID NO: 83873 - DNA, 262 bp, Glycine max
  Clone ID: 700955935H1
cgctgttaggcttttggagccactcaaagcggagtttcctattttgagctacgccgatttctaccagttggctggcgttgttgccgttgaggtcaccggtggacctgaagttcccttccatcctggaagagaggacaaacctgagccaccaccagagggtcgcttgcccgatgccactaagggttctgaccatttgagagatgtgtttggcaaagctatggggcttagtgaccgagatatcgttgctctgtctgggggtcac

SEQ ID NO: 83874 - DNA, 262 bp, Glycine max
  Clone ID: 700955936H1
caaagatatacacatatagggagaggctgaaggaggggcatcagatccctactttgtataaatggggttgtctttctaaacaaccccatcacatcattaagagggggggatcgatccttgatttgtgaatttgcttgcattagcaagatcatatatattcattcatatacacaattacatatcaagatcacattttttttggtgttctcgatctcataaacaacatggagggtcagaacaagaagtacatctcatctgagga

SEQ ID NO: 83875 - DNA, 231 bp, Glycine max
  Clone ID: 700955937H1
aatgttaaaatggtgtaggtttatcatggctgaaatttttgggaatcaaagttataaggaaagtggttgttgtgggtagtggttgaggttgtggttggtaaaaaaaaaaatggattctgcgagaagttggttacaaaaatttcaaccacgtgataaattgagggcctctacaaggaacaaagatgatactaatggcacaaatgaaattccaaatgtgcctatggctgatac

SEQ ID NO: 83876 - DNA, 262 bp, Glycine max
  Clone ID: 700955938H1
tgctgctctggcttcaaggaagtcttctccaagagtgaccaacgaggctgttcagaaggctgctgctgcattgaagggttcagatcatcgccgtgcaacaaatgtcagtgccagactggattctcaacaaaagaagctcaaccttccaatcctgccaaccaccactattggatccttccctcagactgtagaactgaggagggtacgccgtgaattcaaggctaacaagatctccgaggaagagtatgtaaagtcaattaag

SEQ ID NO: 83877 - DNA, 260 bp, Glycine max
  Clone ID: 700955939H1
cgacaattgtccaaatggcagggttccatgctaatgaattggctcttcttctatcccttatagttgccggcatgaatgcagccggaacaattcttggcatttaccttatcgaccatgctggacgaaaaaaattagctctttctagtctgggaggagtaattgtatctttggtcatcttggcctttgcattttataagcaatcatccacgtcaaatgagttgtatggatggcttgcagttgtaggcttagccttgtatatt

SEQ ID NO: 83878 - DNA, 256 bp, Glycine max
  Clone ID: 700955941H1
cgggtttgacgttgttcacaatcactttctgcgcttcactcactcccttcgtgcggttttctttctttgtcgaactcgtgcgaaaatgcgtgagattcttcacatacagggagggcaatgcggaaaccagatcggagcgaagttctgggaggtggtgtgcgcggagcacgggatcgattccacggggaggtaccagggggacaacgagttgcaactcgagcgagtcaacgtctattacaatgaagcgagttgcgga

SEQ ID NO: 83879 - DNA, 258 bp, Glycine max
  Clone ID: 700955942H1
ggagaaaggagatactttatgatgaagaggatgaggatgaggattctaggaagagatggcgcagaagtgtgatagaggagaagagaaagaagaggctgcgtgagaaggaagatgacctggttgaccgacaaaaagaagaggaagaaattgctgaggccaaaaagaaggctgaggaggaacaaaagcgacaaagagatgcattaaagcttttatctgagcatgtggtaaatggtggtaaggaaaatatgattactgaag

SEQ ID NO: 83880 - DNA, 255 bp, Glycine max
  Clone ID: 700955944H1
gagctttccagttctgtaagcaatataagcggacaacagagttccgcagactgtgcgaaatcattagaaatcatttggctaatcttaataaatatcgtgaccaacgagaccgacctgatctttcagctcctgaaagcttgcaactgtatcttgatacaagatttgagcagctgaaaattgctactgaacttggactctggcaggaagccttcagatcagtggaggatatacatggactgatgtgcttagtcaaga

SEQ ID NO: 83881 - DNA, 253 bp, Glycine max
  Clone ID: 700955947H1
ggtggattctgatttttatgattttgacaaagatagagttggaagaagctttaagaaaggccaagtgtgggcggtgtatgatgatgatgatggaatgccgaggaattatgccttgattgatgaaactgtctcggtgaatccttttggagtgaggataagttggttggatgtacagaacagtggggatgggaggattgttagtagggagaaaatggggtttcatataccttgtgggagatttaaggttgccagg

SEQ ID NO: 83882 - DNA, 266 bp, Glycine max
  Clone ID: 700955949H1
ggaacaatggcgggtagggtttcgacgtgcttcttcttcgtgtttgctctttctctccttcttccttttcagatctccgctgaggaatcatcggagaaagagttcgtactcacattggatcactctaactttcacgacactgtcagcaagcacgatttcatcgtcgtcgagttctacgctccatggtgtggccactgtaagaagcttgctcccgagtatgagaaagctgcttctatcttgagtagtcatgatcctccggttgtttt

SEQ ID NO: 83883 - DNA, 263 bp, Glycine max
  Clone ID: 700955950H1
aaatgttccgaagattgcagaaccacagccaggaaactctaagctaatctgacgccaactttcatccaattggaatattattaaatctctttttaagatttcacattttgattcttctcaattttatctgcgattctcgcttggtacctttgttttgtttttaatattttagttttcctggatttttattttttttattttttattgtttttagtctttggtcaattttcactgtctcctgatgatcattttaccatgtgggg

SEQ ID NO: 83884 - DNA, 262 bp, Glycine max
  Clone ID: 700955951H1
cggagttccccaacaaagcgttaacgagcacgcgtttttccgacctgaatccaccactctctgaaccggttctccaagccctatcacactctggcttcgagttctgcacccctgtccaagctgccactattcctctgctctgcagcttcaaggacgtcgccgtcgacgccgccaccggttccggcaaaactctagcttttgtcgttcctctcgtcgagattctacgccgctcctcttctcatcccaagcctcaccaggtgct

SEQ ID NO: 83885 - DNA, 258 bp, Glycine max
  Clone ID: 700955953H1
attagctaacatatagaaagagagagagagagagagagagagagagagatcacatttcctgagctataggctatagccttccataatcttataacaatggaggggaccaccagccaaagcacgtttaccttcatccctagcacaattgagacacctagtccaagcatccctgagatttcatcatcatcaccttcccctggcggctctcttgcaagagttgcacaaagttaccctcctggatttcccagaaaggtattt

SEQ ID NO: 83886 - DNA, 257 bp, Glycine max
  Clone ID: 700955955H1
catccttctacctttgcctatggaggctttctccgtacaatcactcaccgccaccaccattccctcctctctgtcacgtagaggtgccactgacaaaccttctgccacctcccatgttaacctttcccatttcatgaggtacccttgtaccacaagatcaacaaaacaaaaaattctttgcaccagagctcaagcttcaggttcaacgaaatctagtacgggtagtgcagaggggatttctgagaaaacagattcca

SEQ ID NO: 83887 - DNA, 257 bp, Glycine max
  Clone ID: 700955956H1
ggtcaatgtggcatgctttcatccttttgctgggggaggactagtttatggaacaaaggaaggaaagcttagggtcctccagtatgacggtgctcatgcagtgaatggcactggaccaagttactttcctgaggagaccatcgttggtgtcagtcagtgagcaaggtttagacgaatgattggacatgtaattcaaacatctgcttcacattacttactgtacaactcatatgctgtctctgctgatgatctgcaca

SEQ ID NO: 83888 - DNA, 257 bp, Glycine max
  Clone ID: 700955957H1
ccataggtgtggtggtggccgtcaacgagaagggcgaggatcccacacttccatctcagcaaaaatcagtaggggttatctggcaaaacactgatggccagaagctctgccacgaaaccctaagctccgtgaagggcatggacaccgctgatccaaaggcttacatcgccaaggcggtgaaagccaccatggacagcgtggccagggccttcgacgtgagtcgtacgctcagtaccgagtacggaggccacgataac

SEQ ID NO: 83889 - DNA, 255 bp, Glycine max
  Clone ID: 700955964H1
ctcctatggtatgggaggtgctgctgtacatgtacatcctctactctccagattggcattaccgcagtacaatgcccatcttcctcttcgtgtatggtgctctttttgcagttgcccattcagtgtttcattttggtattggcttcaaagtgcattatatcattctcattcttctctgcgttccgagaatgtacaagtattacatttacacacaagatgtttctgccaagcggcttgcaaagttatttttaggta

SEQ ID NO: 83890 - DNA, 263 bp, Glycine max
  Clone ID: 700955965H1
cttctctatttctccaactctttctgcttcttccaccaaagtggcatcagaaaaccaaaaatggggtgtggcaatttattcttcacaattctgataactttctcagtggcactcataacatacaatatcataatctcagccaatgcccctctcaagcaggacttcccggggccctcacgcccttccatcaaggtggatcctctcatcaagatgccactgcctctgactctgtctacaacacgtggcagtgcagggtgatgtac

SEQ ID NO: 83891 - DNA, 265 bp, Glycine max
  Clone ID: 700955966H1
cacaaacacggtaataaaataataccactgtttatatatataaacccaccctccctcgagtttgagttcatcgcaaaatcagaacccaactaaccaaaccagctatggcggcgatgcagaggccactcaagagaaccattgcaatcgccaagctacgcgcgtgcttttcctctctccgacccgccgccgccgccgacatcgtcgcgtctcctccgccgcagctcccgccgttcgatcaccagccgcacccttacaacggtccctt

SEQ ID NO: 83892 - DNA, 262 bp, Glycine max
  Clone ID: 700955967H1
cttacattagcctttctttctttctatgttctctctatctcactcacatctcactttcttttcttttcttttctttttccgaatctgaaatttttcctacaaaatccactccctgtcctcaaagacagatccgaaagtggatgccaaatttattacccctcttcgcccgagattatcgtacccattagattcctcttctttcatccttctacactttcctaatttttcacagtattcgatgctgtagagcacaatatagttt

SEQ ID NO: 83893 - DNA, 262 bp, Glycine max
  Clone ID: 700955968H1
ctccgtttgcagcgtcactacttgctacaacacgagccatgaaacccaccttcccaatccactccaattcaaatttctcactataaaccacttcttcaaacttccctccgcaattcttaattcattcgaaccatggcagcgtcctcgctctgttcctctttcacctccaaaacatggaacccgcaccggccgcactcatgctatcaccacaaaaccccaagcccgccgtattccacctttcttcgcggcgacgttcagctcc

SEQ ID NO: 83894 - DNA, 257 bp, Glycine max
  Clone ID: 700955969H1
gcaaattctggtgcccgtttaggtgtagctgaagaagtcaaatcctgtttcagagttggttggtctgaggaatctaatcctgagaatggctttcagtatgtatatttaacacctgaggataatgctcggattggatcatcggtgatagcacatgagttaaagcttgagagtggagaaaccagatgggttatagataccattgttggcaaggaggatggccttggcgttgaaaacttgagtggaagtggggctattgc

SEQ ID NO: 83895 - DNA, 258 bp, Glycine max
  Clone ID: 700955970H1
tttcctttctataacctatctgaaggctcaatctctgccacagaatccttagcagtcatagcatcaattctcatattactttgcttctgtttcagatcttcaagtatctaccttcttgactatgtttgttatatgcctcctgataatctgcgccttccttactctcatattgtagaacactttgaattgtgcaattttgaccctgaactcataggctttgaattgaaagtattggaaagatccggtattggcgtggag

SEQ ID NO: 83896 - DNA, 256 bp, Glycine max
  Clone ID: 700955971H1
gcagaaaattctaatcctgcagcagcaaaaacctatattttcctgcatttgcctcaggaatctgaggttaagggcaaaccacgcattggtgctactggcagaaagtagagatgatcctgctgtgtgatactgttctattatgtaaatagttggcttgtcctggtatatggtagaggcaaggtattagttgatatcaaaatatagaagttgaatgggctggtcgtacttggaagatttttttttttttttgtgcgcc

SEQ ID NO: 83897 - DNA, 255 bp, Glycine max
  Clone ID: 700955974H1
tagaaccaaaagattcataataactaacattagaaactaggtgaaagtaactgcacagacacacaacacatcttccttaatttctccgtccatttccctcccataaataaatctttcatttccatctttcttgggtgatccaatggcgacccttttccagggattgggagttgtgaacccatcattggcttcttcaaactccaacaagttccatcttccttctcgtacatccctctcagagaggaaagatggcat

SEQ ID NO: 83898 - DNA, 253 bp, Glycine max
  Clone ID: 700955975H1
cttcgatcacctcgaagcgtcgtcgtttactagcaatgattgcttgcgtgggaaccccttgaagacttgctagttatagtgggtgacccgggatccgaatacgtacccggatagatacccgatttgtttacaaggtgtggtgtaataattttattttattttgttgttaagtggtgtaagtgtaatataacgttttagtgagaaagttgaaagagagaaaggaaaagaagtgagggcataggcatctgcgtgc

SEQ ID NO: 83899 - DNA, 252 bp, Glycine max
  Clone ID: 700955976H1
tgcatttcaatccacatcggtcaggccggtattcaggtcggaaacgcctgctgggagctctactgcctcgaacacggcattcagcctgatgggcagatgccaagtgataagactgttggtggaggtgatgatgctttcaacaccttcttcagtgaaactggggctggaaagcacgtgcctcgtgcgatttttgtagatctcgagcctactgtgattgatgaagttaggactgggacataccgccaactattt

SEQ ID NO: 83900 - DNA, 250 bp, Glycine max
  Clone ID: 700955978H1
gcaccgtcaaccactccgtcaccgacggcacctcgttttggcacttcttcaacacctttgccgccgtcaccaaaggcggcgccgccaaaaaagtcctccgagcaccggactttactcgcgacaccgtcttcaactccgccgccgtcctcaccgtcccctccggcggccccgccgtcacgtttgacgtaaagcagccactccgggaacgcgtcttccacttctcccgcgaacaattcagaaactcaagcaa

SEQ ID NO: 83901 - DNA, 252 bp, Glycine max
  Clone ID: 700955980H1
aaagaagttctaaggaagagggaatatgcagaatacaaggtgctagttgtctatttgcaataacaacatcagcgatccaaccttagtattcttcaacccagagagatttgtaataataaattacaacaacttaaacgatggcaggaggagcttatgtagattcgggaaatgcaaagcaatttgatgggaaggtcacggcattcgtattggttacatgctttgtggcagccatgggaggcttactcttcggtt

SEQ ID NO: 83902 - DNA, 260 bp, Glycine max
  Clone ID: 700955981H1
gcaatgtagaggttaaaccacagggtgttagcaagggactagtggccacacgcctactttctgccatggaagaaaaggggatgtgccctgattttgttttgtgtataggcgatgacaggtctgatgaagacatgtttgaggtaatcaccagttcgatggggagtccgatcgcggcaaaggccgaggtattcgcgtgcacggtttgtcgaaaacccagtaaggctaagtactacctggatgatacaactgaaatagtgaga

SEQ ID NO: 83903 - DNA, 262 bp, Glycine max
  Clone ID: 700955982H1
cgcagaagaagatcggcaaccgcatgacagcgtgccagctggcatccatcggaccggttagcaacccgccgccgacgccgatggcgccttcagcggctccgtcgtcgtcggtttcggagtacacacagaagaagatctacgtgagcaacgtcggtgcggacctggatccgcagaagcttctcgcgtttttttcacggttcggggagattgaggaagggccgttggggcttgacaaggccaccggaaaacctaaggggttctg

SEQ ID NO: 83904 - DNA, 258 bp, Glycine max
  Clone ID: 700955983H1
gtgaagtgttcggattgcggcgacgtgagcggttcgctgcccgcgacgtagtgagaagtccactgaaccttatcatttagaggaagaagaatacatccagcctgctccagttttggctgctaatgatattgaggtccctgttgcttgaaaagttatacactggagaagtaattcatagtagctgagtgcctagtttttcttgtgtgcaatgtttgttgtcaaagacatgttcaaaattttgtagtttcttgaattttg

SEQ ID NO: 83905 - DNA, 261 bp, Glycine max
  Clone ID: 700955984H1
cctcgagccgaatcggctcgaggcggaaacggcaacaacaaggagaacgaagacagcaccatcaccgtcgtcttgaaggtcgaaatgcactgcgacggttgcgcttccaaaatcatcaaacacctccgctgtttccaaggtgtggaaacggtgaaggctgatagcgacgccgggaaggtgaccgtgaccggaaaagtggaccccacgaaagtgagggataacctggcggagaagataaggaagaaggtggaactggtgtct

SEQ ID NO: 83906 - DNA, 253 bp, Glycine max
  Clone ID: 700955985H1
caaaaggagagtgcaataactcgttgtacattcctagtgtgtgggagagacatggctaagatgtgtgttttggtgttggttcttgctctggctgtggccacaagtgccagaaacgttcccaaccccaaggatgctggtcttaaggaccagaagaacttcatcagctatggtggagttggtggttattccgggattgggaacaatggactgccttttggaggagctggtgccggaataggtggtggttttggcg

SEQ ID NO: 83907 - DNA, 256 bp, Glycine max
  Clone ID: 700955986H1
cgcgattgttctgttgtgcgactgaaagaagagagatcgaaaatggcgttggctttcgacgagttcggaaggcctttcataatcctgaaggaacaggagcagaagagcagacttcgaggtttggacgctcagaaagccaacatctccgccggcaaagccgtcgctcgcatcctccgaacctccctcggccccaaaggcatggacaagatgctccagagccccgacggcgacgtcactatcacgaacgacggtgcca

SEQ ID NO: 83908 - DNA, 256 bp, Glycine max
  Clone ID: 700955988H1
tgcctcttcctctcagattcagcaattttctattttctcctctcatggcttcagattccaaaaaggatttccctgctgatgacaaagctggaacagaagagagtaaaacatccaaagatgagacttcatctaaagattctccagcagaacaaagagcgacagctacttttggacctagacctggacctgctgggcatccaggcaacccttttgatctctcagcaatgtctggtctgctcaatgatccaagtatcaa

SEQ ID NO: 83909 - DNA, 251 bp, Glycine max
  Clone ID: 700955989H1
tgttggggatgcaattgtgagaaggttggagaagaattgcttgagtagcagcactaatgtcaatggcttaccaggtcttggagggtgctctaagtgcttaaataccctctatttgcttaacaagaagacttcaaattcaagcaaagcagaagacaggaccaccaagatccacaacaaagattgtgagcttatgggcttgacatggcttctggctaaaaataggacagcttatatgcacacggtttctgcgg

SEQ ID NO: 83910 - DNA, 252 bp, Glycine max
  Clone ID: 700955990H1
ggagcttctgatgcaaattctgtcccttgtggatgatcagacggtgatcatagcttctggagtttgtcgtggatggagagatgctatttactttggccttgctcgtttatcactctcatggtatattgttttctctcttgatgtcttgaggatccttttctgtttctctccaattggggattttgttatggtgggagttttctttgttctttttgcttgtttgtgtgagttgattttgctatgctgtaattt

SEQ ID NO: 83911 - DNA, 248 bp, Glycine max
  Clone ID: 700955993H1
gagaatccgaaaaacacgttaaagaaagtcccattcccactaccgaagcaaattaagaagatgaagcagcagagagtggagtttatgggcatgggcatgggcatgggcatgggcctgggccttttggtggtgatgatggcatgtgggtcggcgagtggtgcggatgatttggcaaccaagtgttcagcggtgattcagaaggtaataccgtgtttggatttcgcgaaggggaaggaagaaacgccgaa

SEQ ID NO: 83912 - DNA, 248 bp, Glycine max
  Clone ID: 700955995H1
gatcaaacgcacacagttacgctcttcaaatcaatctcttctcagaaatgggtgtggctcaaaacattcccgatgcggaggagggaaccttggagattggaatggaatacagaactgtgtctggagttgctgggccattggtcattcttgataaagttaagggacctaagtttcaagagattgttaatattcgcttgggagatggaactactcggcgtggacaagtgctagaagttgatggtgaaaag

SEQ ID NO: 83913 - DNA, 252 bp, Glycine max
  Clone ID: 700955996H1
gttccaagtctgccttatctgctgttctagtttattggcattgggatcagtaactgcaattcccaatgcaaattttcatcgggcgccaaggagcactagtgtgcttctggttgttgtctgtgttttttgtggtaacaggattcaacaatgaagagcacaggacagtggaggtagttggcctaggagaatgcgcagactgcaggcagaacaatattaagaataaccacgctttctcagggttacgtgtgacgg

SEQ ID NO: 83914 - DNA, 264 bp, Glycine max
  Clone ID: 700956001H1
caagttttgaagttttaaagagcagggcaaaaccagagcctgacttccttgttttgtgtgtctgtgtctcccaagattctgctgaggccttaagggagtatattacatatctccatgtgcggtgtttccaaggggaaaccttctcaaattgatttgatcatggaggagaagtatgcaaaagaagggatgcatcataagatttctgctttgcttgagttttcagcgacggatgatctaattggtttcaaagatgctgtggaaaag

SEQ ID NO: 83915 - DNA, 258 bp, Glycine max
  unsure (1)..(258): unsure at all n locations
  Clone ID: 700956002H1
gaagatgtggtgcattagaccttagtctttgtcatagtttcttccacaacaacttggtcctanatttccaaaaattcacataagagcaatagttctctccctagaaactgatatgctatataagccgtcctttggagcaatatatccatcctcttcagtttagcagaaggtgtcgtgtattagaccatagtctttgtcattgttgtttcgcaacatcaaagtttagcctttgagcatcagcaatcacatggtgatcag

SEQ ID NO: 83916 - DNA, 258 bp, Glycine max
  Clone ID: 700956003H1
ctcgagcgattcggctcaggccgagcgctacgaggagatgagtggagttcatggagacatgtctccgcctccgccgagtgcgaggagctgaccgtggaggagcgcaacctcctctccgtcgcctacaagaacgtaatcggcgctcgccgcgcctcctggcgcatcatctcctccattgagcagaaggaggagagccgcggcaacgaggaccacgtcgccgtcatccgtgactaccgctccaagatcgaggccgagctc

SEQ ID NO: 83917 - DNA, 159 bp, Glycine max
  Clone ID: 700956004H1
ttttcattcattttcaggtttagagagaccctaacacacttagcgtgatcaagatcaacaatggcggaaaacccttccgaaacggtgtcgtccagttcccaacctcctcctcctcctcctccttcttcttcttcttcttctcagaaatcgccccaagat

SEQ ID NO: 83918 - DNA, 258 bp, Glycine max
  Clone ID: 700956005H1
cagccatggccactctaagcttcaaccctgttagaataaaatccccaacgttcaaacattccaaactcaccactccatcaaaacgcatcacaattccatgcaccactccctccaacagccaccccaaactgctccacttccgaccccgttcggtgtccgaaagcacccagaaagaagcacccgaagcggttctcggagaagaagaagaagaagaagaagatgatgatgatgacccatctgcggaactgagctacgtgg

SEQ ID NO: 83919 - DNA, 253 bp, Glycine max
  Clone ID: 700956006H1
acccttctttgactgttctcccacaccacacccatgatactcctcctgctccttattctcctctttcacgcggcggaaccaacgggacagtggcagctcctccacaaaaacatcggcattgtcgcgatgcacatgcagcttctccacaacgaccgcgtcatcatcttcgaccgcaccgacttcggactctccaacctaaccctccccgacggaagatgccgcaacaacccactcgagttggtcgtcaaacgcg

SEQ ID NO: 83920 - DNA, 254 bp, Glycine max
  Clone ID: 700956007H1
ttcacggtgaagcacctaagccacttctccaccctagacgtcctcttgaaaccctactacagcaccacacttccccctctcaattcatctctctctcgatttacattccagagatagaagaagaaagagagcaatgacagcaacaacagagagcgagaagaagaagcgagaagaagaagaggaaccagaacaagttgtgaacccatgggaagtttcagccataggtaaaatcgattacgacaaactcatagatc

SEQ ID NO: 83921 - DNA, 255 bp, Glycine max
  Clone ID: 700956009H1
ctccgttacattactttcccatttcattattcgatccccaatacctctcccacgcagaagaatcatcaccccaaaacccaaattaaaaaaaaaacccaaataatacaactgaagttattttaattttcttagtaaaaaaaaaaaagagaagaaaaatgacttcgattcatttgataaacactctcgctgctccgcttcgttctttttctcctccgtcgctttttccgcaatgccattctcctctccgttcttccg

SEQ ID NO: 83922 - DNA, 159 bp, Glycine max
  Clone ID: 700956010H1
ttcattggtgtggcctagctgttttctcaatgagaaagccttcatctctgcaaagcgcacttttgcgctttggggttcccttgttgcttgtgatcaccttctgttatgctacttctactgctgcagcaacaactcaagtttcagggaatgaagagctgc

SEQ ID NO: 83923 - DNA, 160 bp, Glycine max
  Clone ID: 700956013H1
tcagacacagtcctatttctttcactatgttcacattgctacttggagtgcttgctcagaaccttgtcatccctgtaatatctaccactgccatcattgtggaccagaacttcaactctccagacccacatgcaggaacagatttatcatattctctatg

SEQ ID NO: 83924 - DNA, 255 bp, Glycine max
  Clone ID: 700956014H1
gtcaaacccttttcacttctctctagggttttagcactctctctctctctcgttttcgttcttcctttctgcctctctcagtcacacaccttctcgatgaccaacgacaacatcgccgtgacagatctcacttctgccctcaatgaagataatcgcgccgacctagtcaatgctctcaagagcaagattcagagtctggctggggcgcattctgatgttctagagactctatccccgaatgtcaggaagcgtgtt

SEQ ID NO: 83925 - DNA, 162 bp, Glycine max
  Clone ID: 700956015H1
ccatgttcccccgtcgttgcctgagcaaggacaagttccagtggataatgggagtaagaccagtagttcaagcagctccagcagtgattcaggctcttcatcaagtgattctgatagtgatagttcctcagcctctgggtctgatgcagggtcaccaaaaac

SEQ ID NO: 83926 - DNA, 261 bp, Glycine max
  Clone ID: 700956016H1
aacaaagacggcaccgcaattaggaagctccagagcggtgtgaacaagctcgcggatctggttggggtcacgcttggtcccaagggaaggaatgttgttctcgaaagcaagtacggctcgccgaaaatcgttaacgacggtgtcaccgtcgccaaagaggttgagttggaggatccggttgagaatattggcgccaagttggtgagacaagcagctgccaagacaaacgacttggctggtgatggaaccacgacttcggtt

SEQ ID NO: 83927 - DNA, 260 bp, Glycine max
  Clone ID: 700956017H1
attacttgcaagactggcacttcgttgcttggtgatgtccctttctgttctcttcactcttggtcttgcgagagaaagccatgccagagacgaagatttttggcatgctgtttggccaaacactcccattccaagttcattgcgagatcttctaaagcctggccctgcaagtgctgaaatcgatgatcaccctatgcaaattgaagaaacacagtacccgaaaaccttctactataaagaagaccttcatccaggcaaaa

SEQ ID NO: 83928 - DNA, 250 bp, Glycine max
  Clone ID: 700956019H1
tcatcacatggacttgtctttctcttactctgacggggtccttccttttcttcttctccttcatattttctctctcaccattctcttcttcttctccctttcttagattctccctcttttctctctgccctccgccatgactgaggataaggagatgtcttcctctgtcaccaatggcgatgattccctcactggtcacatcatatctacaactattggaggcaaaaatggggaaccaaacagactatta

SEQ ID NO: 83929 - DNA, 252 bp, Glycine max
  Clone ID: 700956020H1
gttaatctcattcacacattcacagttatactctctctctctttgtcgcttggatcactgatctcatctcaattttcagatatgtcgacatctgataagccagaagtggtggaaaggggtagcaaggatgaaaaacacaaggaagatgatcaagaggaggggaagggtggattcattgagaaggtgaaggatttcattcatgacattggtgagaagattgaggaagctattgggtttgggaagccaactgct

SEQ ID NO: 83930 - DNA, 157 bp, Glycine max
  Clone ID: 700956021H1
ggaaaaatggagttgttcttctacgcggtgttcggcggtttgggagcggttgttgcagtgacggagctgagcaagagcaacaaggaccgactcaacacctcttccgcattcaattccttcaagaacaactacctcatcgtctattccctcatgatgg

SEQ ID NO: 83931 - DNA, 159 bp, Glycine max
  Clone ID: 700956023H1
aacagaaatcgcatataaaatgcgaaaagaaatgaattcaatgttcggagatctgcacaggatctctctccgtgtccgttgaactttctttacgccctcctcgtaacataaaaattcagatcccgccaactctgaagacctctattctctttccctccc

SEQ ID NO: 83932 - DNA, 133 bp, Glycine max
  Clone ID: 700956024H1
ctattatagtgtctccattaatctaccaaagaaaggtttgaatctgggttgatggagaatatgatgtcttaagattggctctgggttcttgtaggactatttctaataatacggatttaaatgatctctcttg

SEQ ID NO: 83933 - DNA, 156 bp, Glycine max
  Clone ID: 700956025H1
ctgtgtcccccttcactttctttcgaggttgcatttactttccctttcgacttcgaaacgatccaaatactacaaagcaaagcaaccagctagaaagcaatcacgcccgatgacggaagcatctccctctcccttaagcaaacaactgcccttaac

SEQ ID NO: 83934 - DNA, 251 bp, Glycine max
  Clone ID: 700956027H1
ggagcatcttccgcgtcgatttaaccgattccgaactttcagaatctcgaaactcgccgattcgcgtcacgccgccggggttgcactgtttcactccggctgctttccacgacggaaagcgcgtcgcggtcgcaactcgccggagagaaagcaatttaaggcacgtcgaaatcttcgatctcgaatcgcaaacgttccaacgaatcaccgaagacataaaccctaactttaaccattacaacccgttcgtc

SEQ ID NO: 83935 - DNA, 253 bp, Glycine max
  Clone ID: 700956028H1
agtggtttcagtgagtgatcggtgttcacttgatccttcataagtcgtcatcatcatcatcatcatcaccgttgattgaagaagatgccgatcagaaacatcgccatcggaaggcctgaagaggctactcaccccgacacgttgaaggcggggttggctgagttcatctccaccttgatcttcgtgttcgccggttcaggttccggcatcgcctacaacaagctcaccgacaacggcgccgccactcccgccg

SEQ ID NO: 83936 - DNA, 252 bp, Glycine max
  Clone ID: 700956029H1
tagcggttcttccatttgactcttgttctgaacgacttttcaagagaatcaaaccatggcagtgaaagtatacggtccccactgtgcttccaccaagcgggtgctggtttgtctggttgagaaggaagtcgaatttgaggttgtccctgttgatgtcactaagggggagcagaaggatcctgagtacctcaaactacagccatttggagttgttcctgtcatcaaagatggagattataccttatatgaatc

SEQ ID NO: 83937 - DNA, 252 bp, Glycine max
  Clone ID: 700956030H1
gcacttagaaggttgaggactgcttgtgagagggccaagagaacattgtcatccactgcccagaccaccattgaaattgattctctctatgagggaattgatttctactccactgttactcgtgccagattcgaggaactgaacatggatctctttaggaagtgtatggagccggtggagaaatgtttgagggatgctaaaatggacaaaagaagtgttgatgatgttgtccttgttggtggttctaccaga

SEQ ID NO: 83938 - DNA, 264 bp, Glycine max
  Clone ID: 700956031H1
tcttctcgacgttgtaacctctctcttcaaccctaacttagggtttatgttctaaaacccttttcaggttgattggaggagataaaaatgctcgtgttgtttgaaacccctgcgggttatgccctgtttaaagtgctggatgaaggcaagctttctaaagttgaggacttgtggaagaacttttccagtgcagatactgctagacaggtggtcaagttgaaagcattttctaaatttgagaacacttcagaagctctagaggca

SEQ ID NO: 83939 - DNA, 123 bp, Glycine max
  Clone ID: 700956032H1
tagaattatgcgtgtcgatttactttcgattgttgtcagacattcaacatgaaaattatagtttgctgaactggttatgatttcatcaaggtttttgaaaaaattagcttcaatttggtttac

SEQ ID NO: 83940 - DNA, 193 bp, Glycine max
  Clone ID: 700956033H1
atttaatgtgaaaaacatataagagcataaaatactttctccttttagttccttaatcattactctaacaacattgattagcaagacctaaaggagaaagtatttaatgtgaaaaacatataagagcataaaaaaaaagttatggacaacataattttatgcatttcaataaaatttctccttttagtttttt

SEQ ID NO: 83941 - DNA, 77 bp, Glycine max
  Clone ID: 700956035H1
aacataggttaggaatgcaggggtggcgccggcggtacaatacaatgataatatgaattaaatatgtttagtttctc

SEQ ID NO: 83942 - DNA, 154 bp, Glycine max
  Clone ID: 700956036H1
ggcatcttgtgttgtgtccctcttttaagctatttccttctcttaacacaattggttgtgccaattgccatagtcaccaaccaattaacaaaggtatatatatcatcatatcatcaccaaatgaaaaatattgggttgttttttcttgtggtgg

SEQ ID NO: 83943 - DNA, 253 bp, Glycine max
  Clone ID: 700956037H1
agaatccaaaagcaatcccatctgtgtgtttgcacatcggaagggagggctatcaaactctaaggattgctctgaatcggtttcgtcttcttcgtttttcttcaaaatcctcgtgacagatctaatctaatcagccttttgggggtgtttcagacattgcatgcatatgggagcagtggttgtgttggatgctataaaaggccttcactgagtcccacagtggatgtgccatcaaaagggttggcaacacaaa

SEQ ID NO: 83944 - DNA, 251 bp, Glycine max
  Clone ID: 700956038H1
gatgctgcaactagtactggagctcctttctggtctgcaccaaaaagattccctcgtccactacaattctcagcctctgatttgggtcatctaaattttgtgtcgtcagcttctattttacgggcagcaacatttggtatcccaatccctgactggggtaagaaccctaggaagatggctgaagctgttgatagggtgatagtacctgactttcagcctaagaaagatgtgaaaatagtgacagatgagaa

SEQ ID NO: 83945 - DNA, 254 bp, Glycine max
  Clone ID: 700956039H1
ggttcctctccgtgaacacccaaagccaaacaaacaaacattaaccttaaacaaacaaaccctaattttttatctgcccctaattgtttgttcccttctcatccattcctaaataaattctagatcatttttttgccatatttcccaaataaaattccccgattaaccttcgtgctacccacgaaatctatttgtcttcccatttgtttctgagcatttagctgtcgcttctttttgtttgttcatgtcatcct

SEQ ID NO: 83946 - DNA, 253 bp, Glycine max
  Clone ID: 700956040H1
tcactttccattctcttcaacctaacgcagcatcgctatactcttcattccatggctttgcccaatcagcaaaccgtggattaccctagtttcaaactcgttatcgtcggtgatggtggcacaggaaagacaacctttgtgaaaaggcatctcaccggagaattcgagaagaaatatgagccaaccatcggtgtggaggttcacccattggattttttcacaaactgtggaaagattcgattctactgctggg

SEQ ID NO: 83947 - DNA, 251 bp, Glycine max
  Clone ID: 700956043H1
ctcgagccgctcgagccgattcggctcgaggttaagatcaccgtttcttcttcttcttactcttcttactcttctactactactactactactactcctccacaaaatgatgctcagaatcaagagggttcccactgtcgtttccaactaccaaaaagacgacgctgcagactctcctcgtcccgtcggaggttgtggtcggaattgcctcaaagcttgttgccttccagatgcaaagctgcctttgtatg

SEQ ID NO: 83948 - DNA, 248 bp, Glycine max
  Clone ID: 700956044H1
ctgggccaaggggcactacacggagggcgccgagctcatcgactccgtccttgacgtcgtgcgcaaggaggccgagaactgcgactgcctccaggggttccaggtctgccactcgctcggcggaggaaccggctccgggatggggacgcttttgatttccaagaacagagaggagtaccctgacagaatgatgctcaccttctccgtttttccttcccccaaggtctctgatactgtggttgagcctt

SEQ ID NO: 83949 - DNA, 253 bp, Glycine max
  Clone ID: 700956046H1
atgggtgtttctgcattatcaacataaagaaggactaataatattttttaacttatggtttttctggtgatttgaattaaagtgagtatttttctgttgggggttgattagtttattctggtatctgtgtgggatttccaggcatttacggaaggtgggggatttgactttgttggtgacaggtgtcagctaaggaggttacggaaggtcaagtttgtttgtttgattgattggagtttctgttacctctaca

SEQ ID NO: 83950 - DNA, 255 bp, Glycine max
  Clone ID: 700956047H1
gagggtgttctgtgtttcctcccttccctccccttccccggtcagcggtgttgttttgttcggaatctgaaatcggaaatcggaagaatagtcttcacttcagaggcagaagagaagggaaaatcgatgagtaggaacgattccaagtacttttccaccaccaagaagggtgaaatccctgagctcaaagaagagctcaattctcagtaacaggaccaaagaaaagatgctgtcaaaaaggttattgctgcaatg

SEQ ID NO: 83951 - DNA, 254 bp, Glycine max
  Clone ID: 700956049H1
gaacataatggagaaccctgcttggtacactcagtacacaccttaccaggctgagatatctcaggggaggcttgagtcattgctgaattaccaaaccatgatcaccgacctcaccggcttgcctatgtcgaatgcttcattgcttgatgagggtactgctgctgctgaagcaatgtctatgtgtaataatattcagaaagggaagaagaagaccttcattattgcaagtaactgccaccctcagacaattgata

SEQ ID NO: 83952 - DNA, 256 bp, Glycine max
  Clone ID: 700956050H1
cgccgccagatctcagacgagactcagtcacactttctctctttctcttccacaatgcagctcctccgggcggtgctcgcggcggcgctgctcctcctcgccactctctccgacgcccacaacatcacaaccatcctctcctagcaccctgagttctccaccttcaaccactacctgaccctgacccacctggccccggaaatcaacggcaaaaccaccatcaccgtctgcgccgtggacaacgccgccatgtcgg

SEQ ID NO: 83953 - DNA, 249 bp, Glycine max
  Clone ID: 700956051H1
caagggtgcgagggtgctcgttgtctgctccgagataaccgccgtgacgttccgcggcccctcggacacgcacctcgactcgctcgtgggacaggcactgttcggagatggcgccgcagcgttgatcatcggatcagaccccgacccagcagtggagcggccgatattcgagatgatatcggccgcccagacaatcctgcccgactctgacggtgctatagatgggcaccttcgggaggtgggactcac

SEQ ID NO: 83954 - DNA, 156 bp, Glycine max
  Clone ID: 700956053H1
ggccgccctttttttttttttggttggtttaatttatttcctgggggaaaaggtgtttaaaatggtttttaggaggaaaatggaaaggtttccggggaaaaggggttctgctgtaaatccttggaaccaataatgggtttgggtgattaaaagtga

SEQ ID NO: 83955 - DNA, 251 bp, Glycine max
  Clone ID: 700956054H1
atggtcctaaggggagcaaggggtatcatcatcaacagcattctcattctcatcatcaccatcaccaccatcagcctcattatcagaggaaggagaagaacaagtattcctccggtggtggtggaccatcacatggaagtggtcatttgatggcgccctcgggctctgctgtggggggtttcaaccctggtgtgccggcccaggggttgaatccggtgcttggacaggcgttgactgcattgattaatcag

SEQ ID NO: 83956 - DNA, 251 bp, Glycine max
  Clone ID: 700956055H1
tgggcactgtgctcctgtaacttgccttggtctttcacctgatagtaattacctagttacaggatcccgagacacaacagtattactctggagaatacatagggcactttcatctcactcaagtgccgtatcagaacactccactgggacaggcacattgtcttcaaccagtaatagttcatcgcacttgatagaaaaagaccggagacgtcgaatcgagggtcctatacaggtacttcgggggcaccaca

SEQ ID NO: 83957 - DNA, 252 bp, Glycine max
  Clone ID: 700956056H1
caaaccatggcttccgaaacaaaccagtccaagaatgtgtgtgtaattggagctggaccctcggggctattggcagcgagggagctgagaaaagaaggtcacaaggtggttgtgttggagcagaaccatgatattggaggtcaatggctatatgacccaaatgtacaagaggaggatcccttaggaagagacccttggctaaaggtgcatagcagcatctatgagtctttaaggttcatgtctcccagagag

SEQ ID NO: 83958 - DNA, 236 bp, Glycine max
  Clone ID: 700956057H1
cgcagagcagagagagagaaaacgcaaaggcattatttggtcttggatccctttcgatccgacgacttcgttcgttccttctccttccaagttctaaccatttcccactgtcttcgattttagggcattaaatctgccatggcagcagcacccgctagagctcgtgccgattacgattacctcatcaagcttcttcttatcggcgacagcggtgtggggaagagttgtctactttt

SEQ ID NO: 83959 - DNA, 247 bp, Glycine max
  Clone ID: 700956060H1
catcaacctcctttttttttaattaattttttgtttccgttttgctgatttgtttaattggttgcttgattctcagggtaatgcttgtgggttggggtggaaacaacggctcaaccctcaccggtggtgttattgctaaccgagagggcatttcatgggctacaaaggacaagattcaacaagccaattactttggctccctcacccaagcctcagctatccgagttgggtccttccagggagagga

SEQ ID NO: 83960 - DNA, 249 bp, Glycine max
  Clone ID: 700956061H1
ttataattggagaagctctaaatgcttatgcctcaagaaggatgcctggtttcaacaagggtgtgatccaaggagatattgtaagaaatagattactgttggagaccataatccgaatattacccttggacgtgggcagtgtctctttcagtttcttggtgaagttattaagggtagctattcagttggaacgtgaagagttggagagatctgaactgattaggagaataggtatgtgccttgaggagg

SEQ ID NO: 83961 - DNA, 110 bp, Glycine max
  Clone ID: 700956062H1
gttttatcaaattttttgtcggatttacaaggaaagctatccataaaatgtttttattagacaagtcacggagacaatcttgaaaacattttatggatagctttccttgt

SEQ ID NO: 83962 - DNA, 259 bp, Glycine max
  Clone ID: 700956063H1
agtccaaaaataaataaataaaattgtagcaatcacaacacaaccaaggctacgacttaaagcaaccgcaatcttttggccaaaagtcacacacacattactacacgcatctaaacactcctccgaactataatacagttttcttattttcattgttgaagctcacaagcaaaggctaaagtagattctattctcctcaagcaaaacctatagctcccccacactcctccagtacttgaataaaagctaaataaatatt

SEQ ID NO: 83963 - DNA, 254 bp, Glycine max
  Clone ID: 700956065H1
ccaatttctcgtcacttctccgcaaatcctcgccgccgccgtcccaccaacacccgcaaattacagaccttagcgtgccaaacaaaccccaaccttgatcaaaaggatacccctaccacggatgaagaaaaacttgtggtcgagcccagcacgagtacaacaacaagttctcttcctcaattgccgaccaaaaacatcaacaacaaaatcgcacttgtttctaccttagcggccttggggcttttcttatctgc

SEQ ID NO: 83964 - DNA, 249 bp, Glycine max
  Clone ID: 700956067H1
caaaacttgaaattggtttagaaattcaagatgtttgtggagtgacagggaaaaagagagttgtcgttattgtaattcttgtgaattacatgctgcaactatgatttcctcatattattcttcacagaagcaattttctattgtggtgttggggtattcctttatctactagaccatgtaagaagacccttgctagtggatacagttgctaacaatagtgatactctacccccacaattgggacagaga

SEQ ID NO: 83965 - DNA, 125 bp, Glycine max
  Clone ID: 700956069H1
gtgaaaatggctttatcatcgcgctctctgagtgttcaccggacagaggtgtcaaccggagctggtggctcctgctaaacccagtcctcgcggagttacacccctctccgagatagatgaccaat

SEQ ID NO: 83966 - DNA, 247 bp, Glycine max
  Clone ID: 700956071H1
ccaaaacctgatttcatattcaccccactggatgactctcaagtccaagcagcagtggtttgtgcaaaaaagcttggtattcacatgagagtgcgaagtggagggcatgactatgaagggctctcttatgtttccctcattgagaagcctttcatgatcctagacttggccaaacttcgtgcagtgaatgttgatattgcgcgaaacacggcttggatccaagccggtgctactattggtgaagttt

SEQ ID NO: 83967 - DNA, 246 bp, Glycine max
  Clone ID: 700956073H1
ctgtcatcgtgtcgttcaccgataagatgtcgtattcaaggagatcaaggtattctcgttctccttctccatacaagcgatacagtaagtctgtgtccaggtctctctcaaggacaagctccagaagccgttcaaggagtttatcaagagatgctgaaaatccaggaaacaatttgtatgtgacaggattgtctcctaggatcaccaagagagaactggagaaacatttttctgctgagggaaaag

SEQ ID NO: 83968 - DNA, 254 bp, Glycine max
  Clone ID: 700956079H1
ctcactttgtatattcctcccatacgcagtttcaacctcttcgtccacaccctccagatctttctgcaagatttctctctcttctcctttcgcccttttcttcgcatcagactcgccatctctcgcatcttcaactccatcatccacgtaacctggtagatcacatcctctctctctctgttcttttttctctctctttgattggatccaaaaagaatttgaaactttaggggtttgctgtgtaacaatttgtt

SEQ ID NO: 83969 - DNA, 255 bp, Glycine max
  Clone ID: 700956081H1
catattcaaagctacttaatcagggacgtagcaaccttcagcccttttgtccaccaaaacctgatgacattgcaaccatttgctacacaagtggtacaactggaaccccaaaaggtgctatcttgacccatggaaactttattgcaagtgttgctgggagtactatggacgagaaattcggtccttctgatgtttatatatcctatctccctttggcacacatttatgagcgagcaaaccaggtcatgacagtac

SEQ ID NO: 83970 - DNA, 254 bp, Glycine max
  Clone ID: 700956082H1
ctcttgaccctttggtgcatagtagcaaaagggggtggttgcataaagcagaaaagttggtaaatggcatggtatatctttaacagttgagccttttacgggttgaatattctgaaaaagttaagttgaaggtgaaaagttgaaagtttagcacttgggagtttagttgttgttgttgttaggaaaaggtgaaaaaggttggaaggagtgaggataataatatgccaactgtgtggttctctttgaagagatct

SEQ ID NO: 83971 - DNA, 249 bp, Glycine max
  Clone ID: 700956083H1
atcacaatttgtgcattgcctcgtgtcctttttcttctttgcttgccaaaaatcttacacacacaggtatctagcaaatgggttctcaccagcaagaaccatggctattggagaatgggaaaccgcgggtgttgaccaaggagaataggcatggccgttctgcacacagcatgtcctccacgtctttgcgcaagaagtctagccgaactcttgtctccaagcttccatgtgccacactcagaagcatcc

SEQ ID NO: 83972 - DNA, 240 bp, Glycine max
  Clone ID: 700956084H1
gaaaaatattaaataaaaccgccacaaatttctccatagttatgggcacttccattctcgacgccctgaacgttcgcgtggaaggttccggcgacaagtaccttgtcctggcccacggcttcggcacggaccaatccgcgtggcagcgcgtgctcccttacttcacccgcaactacagcgtcattctctacgacctcgtctgcgccggcagcgtcaaccccgaccacttcgactaccgcc

SEQ ID NO: 83973 - DNA, 250 bp, Glycine max
  Clone ID: 700956085H1
ctttgtttaatcacgtggaccattagagttggtgaactcttcatttcctcacactacttaggataaaccgtccttcacacttatcattattgtcatcctttcttcttgtagaaggtcaatgtcatggatgatggtcctgcaaaattaaaattcatccctgatcattttcaagttccaacatcaagtatagaatctcctgagagcagaacatcatctattacagaacctggaactgatcaatctccaagtt

SEQ ID NO: 83974 - DNA, 250 bp, Glycine max
  Clone ID: 700956086H1
caacaacattcattcattcacagctgtcacgccgtgaacggcacatggcaacggcgagacgcagtttcccgcctatcaccgtatgcaacgggacgacaccgtgcgagtctgtggccgccgacctcgacggtatgctcctcatctcccgttgctcgtttccgtacttcatgctcgtcgccgtcgaagtcgtcagcctcctccgcggcctcatcctcgtcctctcacttgcgttcgtcatcatcgcctatct

SEQ ID NO: 83975 - DNA, 250 bp, Glycine max
  Clone ID: 700956087H1
catcgttaccatggtcaacaagaatgaaaattgcagctggagctgcaaagggtctagcctttctacatgaagcaaagaaaccagtcatctatagagattttaaagcttcaaacatcttgttagactcggattataatgcacaactttccgattttggcttggccaaagatggtcctgaaggagatgacacacacgtttcaactagagtcatgggcacacaaggctatgcggccccagaatacatcatgac

SEQ ID NO: 83976 - DNA, 210 bp, Glycine max
  Clone ID: 700956088H1
gtgctatgttttttttctgctttcgtatgacaagtgtataattctcctgaatacccagcagaagctatcaacaaaagccagaccatgtctggacccctgtctccaaagacatctcttgaaaagagtgaccgtgttggttcattgaagaaaatgctgcggaattctctaacaaggagtacgaagcgagcagcagcaaggtcatgtcggttg

SEQ ID NO: 83977 - DNA, 249 bp, Glycine max
  Clone ID: 700956089H1
gacaaactctattctgtattgtgaactacaatctacatttcttgggtgtggcttcttggaattttgtttgaaaaagatgtgactcgtgagtacttggcgagttggcatggctcctatttgcttttaggtgccacccccagaagtagcctaggccatcctatgtaaattgcgaacttgtttttactttttagcccttatttcaaaattccacacacttctctttcagaatcttacccaatgctataaatt

SEQ ID NO: 83978 - DNA, 250 bp, Glycine max
  Clone ID: 700956090H1
aacgggcccaaatgattgaaactggggaagatattgactggggatttgcagaggcgcttgcttatgctaccttgcttattgaaggtaaccatgttcgattaagtggtcaggatgttgaaagaggaacttttagtcaccgccatgctgtagttcacgatcagacaacaggagagaaatattgtcccctggacaatgttataatgaaccaagatgaagagatgtttaccgttagcaatagttcactttctga

SEQ ID NO: 83979 - DNA, 245 bp, Glycine max
  Clone ID: 700956091H1
ccaaagttgaggtgcgccaaagacgaaagatggtcgctccatgacagccagctctagtgacaggaggcactcgaagcataggtgagagcgcttctccatccagagatagaaaggttttttctacatcatcaaccccaaagagtccagtattggcctctgaaacggacagaaagctcacacaagcttgcttgcttactgtaatgtaatggttatagagagttagtatctattaaattgatggaagc

SEQ ID NO: 83980 - DNA, 250 bp, Glycine max
  Clone ID: 700956092H1
ctcctctctctgcatcgctgcgttttccgaatcgaaaggtgaggttagtaagtaacaatggtggagaaggccaagggtaggaaggaggaggttgtcactcgagagtacaccatcaacctccacaaacgcttgcatggctgcacatttaagaagaaggctcctaaagcaattaaggagataaggaagtttgctcagaaagcgatggggacgaatgatgtaagagtggatgtgaagctcaacaaggctgtgt

SEQ ID NO: 83981 - DNA, 253 bp, Glycine max
  Clone ID: 700956094H1
gacaattcaactacgagttttaccccaagacacaagccaagaatacttacagtttaccttttcttgctcaaaccaacgacgctaacgctgaaaacaatctctacccgtttgtttttctaaacgtcgatggcaacctttttatctttgccaacaaccgcgctatcttgttcgattacaataagaacagtgtcgtgagaacctaccctcaaatacccggtggagatccatggtgttatcctagcaccggttccgc

SEQ ID NO: 83982 - DNA, 257 bp, Glycine max
  Clone ID: 700956095H1
ctcaactcagctcgctcttgttcttcttctccattatcaaacgaagtatagatatcatatcattgcagcttcattttcatccaccaattaactaacaatggcgcacacatcccttttcactccctcttcctctcttaggttcaaccctcttcttcttacctccaccccctcttcttcttcttcttctcgctccaacaacctttctttccccgctctctccaggaacctaaggtaatcggtagaagatagaaagatta

SEQ ID NO: 83983 - DNA, 236 bp, Glycine max
  Clone ID: 700956096H1
aaactccattaaacaaagccaaggcaaacataagcaaaacggcatgtcgtgtaatgtaatgaaacgaatgaaatgataggtaggtggaggattgagagagtgcggtgttggttcaccatgaggaagtttggtgcttgaacttgaacccgaacattgcgattcagacatagagaatggccatggcccgaagagtccctcgttatgttttaggatcggtccaaaggaacatgtccttc

SEQ ID NO: 83984 - DNA, 269 bp, Glycine max
  Clone ID: 700956102H1
tggactgatgatggacttggttattatgagtttctccaacttgcagaggacttgggtgcttcaccaatatgggtatttaataatggtgtcagtcataatgatcaagttgatacatcggcggtcttacctcttgtgcaagaagcccttgatggaattgagttcgcgagaggtgatcccacttcaaaatggggttcccttagagctgctatgggacatcctgagccatttgacctcagatatgttgctgttgggaatgaagattgtggaaa

SEQ ID NO: 83985 - DNA, 268 bp, Glycine max
  Clone ID: 700956104H1
tgcaaatgttggggactccagagctgttatatgcaggggtggaaatgccattgctgtttctcgggatcacaagccagatcaaactgatgagaggcgaaggattgaagatgcaggtggctttgttatgtgggctggaacttggagagttggtggagttcttgctgtttcacgtgcatttggtgatagactcctgaagcagtatgttgttgctgatccagaaatccaggaagaaaaggttgatagctctcttgagtttcttatattggct

SEQ ID NO: 83986 - DNA, 267 bp, Glycine max
  Clone ID: 700956106H1
accttaaattaattatagaaccatgtttgcaactaccaattcctccacttggtcacctttattctctttcagtagaacaacagcaacctctctgccttccaaacccacattctgctatttggttccaatgaaacaatcttcttctccggggcacttgtgcttagccttagacaatccacgtagaacacttcacgtgtcttgtggctccacatcaccacatgcttcccagagatcatcaattcaggggggtgaagcttttttcagggg

SEQ ID NO: 83987 - DNA, 270 bp, Glycine max
  Clone ID: 700956109H1
gcagatcttcgtcaagaccctcaccggaaagaccatcacccttgaggtggaaagctctgacaccatcgacaacgtcaaggccaagatccaggacaaggaaggaattcccccggatcagcaacgtctcatcttcgccggaaagcagctcgaggacggccgtaccctcgccgactacaacatccagaaggagtcaacccttcaccttgtgcttcgtctccgtggtggcatgcagatcttcgtcaagactctcactggcaaaaccataaccct

SEQ ID NO: 83988 - DNA, 160 bp, Glycine max
  Clone ID: 700956110H1
gacggtagtaggccaagtgttttgcataggccgtgactgatcatcagaggcaatggcgagcaggtactgggcagtgtctcttcccgtccacaactcggcatcattacagctctggaaccaattgcaggaacgaatctccaagcattccttccacacaaca

SEQ ID NO: 83989 - DNA, 267 bp, Glycine max
  Clone ID: 700956111H1
gctagccacaatgcagatattcgtgaaaaacctaacggggaagacgataaccctagaggtagagtcatcggacacaatcgacaatgtgaaggcgaagatccaggacaaggagggcatcccgccggaccagcagcgcctgatcttcgccggtaagcagctggaggacggccgcaccctcgccgactacaacatccagaaggagtccacgcttcacctcgtcctccgcctccgcggcggcgccaagaagcgcaagaagaagacctacac

SEQ ID NO: 83990 - DNA, 267 bp, Glycine max
  Clone ID: 700956112H1
atcgttttggaagaacaagggcatgtgagaaaaaacatactaatcaaattaaacagcgaagaagagtttcaaatttattgcttcgaatctccagcttcgtcagggaaggaaaacagcataacgtgtggtctcgggggaaccaaaaactgtgaaattctgaagccactaggccttttaaaaaccaaactaaggaagacggtttagacagagagtacttcaagctaagaaaatggaaagtggggttgtggctgtgaacaacaacatcaa

SEQ ID NO: 83991 - DNA, 265 bp, Glycine max
  Clone ID: 700956114H1
actgaggaggcacaccttcaggagcagtcatggttctcaaaaccgagctgtgccgattcagcggtgccaagatctacccagggaaaggcatcagatttgttcgtggtgattctcaggttttcctgtttgctaactcaaaatgtaagaggtatttccacaacaggttgaagccgtcaaagctcacgtggactgcaatgtaccgaaagcagcataagaaggatattgctcaagaagctgtgaagaagagaagacgtgctaccaaaaa

SEQ ID NO: 83992 - DNA, 136 bp, Glycine max
  Clone ID: 700956116H1
gcaagatcattatctcggctgtttctctcatcctggtggtgggtgttccgatcggcgtggtggtcgccgtgaacaagaagggcgatgatcctgcagttgaatccgaccacaaatacgtagtggtcatatgccaaaa

SEQ ID NO: 83993 - DNA, 263 bp, Glycine max
  Clone ID: 700956117H1
gtcaaagcatatttccttgtaaaaatatgtaagaaaatttagactcagaaaagaaaaatatttgaaggacaaattttagtttcacaacagaataggcatctttattattaccaagaaaaaggagaaattgtccttggcttattaaaccctgtttgatgcttgttccaaacttgagaaatatttggatattgagatttgaaataaaagattagtgttcagtttgaaaaaaaaaaaaaaaaaaaagggggggccgccgattattg

SEQ ID NO: 83994 - DNA, 268 bp, Glycine max
  Clone ID: 700956118H1
cgaacaactcatctccggcaaggaagatgccgccaacaactttgccagaggccactacaccgttggcaaagagatcgtagatctgtgcttggatcgcgtccgaaagctcgcagacaatctgcactggtctccagggcttcctcgtcttcaacgctgtcggcggtggcaccggttccggtctcggatctctcttgttagagcgtctctccgtcgattacggcaaaaagtccaaattagggttcaccatttacccttcccctcaggtttc

SEQ ID NO: 83995 - DNA, 133 bp, Glycine max
  Clone ID: 700956120H1
gcaggcagtgtcatctctcctttgacgacaagatgagcatcccaattccccatcggcagttattcatagacggagactggaaagtccccgtcctcaagaatcggattcccatcatcaacccttccacacaaca

SEQ ID NO: 83996 - DNA, 266 bp, Glycine max
  Clone ID: 700956121H1
attacatgtttgaggagagtgtgtgcctgctacttcgggcctcatggttcacacctttatctgttgaagaacatgtggttcatgaagatgcatatgaagacctagaagattattatcagtacgaggatgatgatgatgatgatgatatggatgaagtttactatggtggttcgtccagtcttcgggttattggcaaccgtagatggggagataatggttatgtcagggctggtcgtcaagaagctcggccagtccatcgtccaaac

SEQ ID NO: 83997 - DNA, 267 bp, Glycine max
  Clone ID: 700956122H1
gtttccaactttccttcttcttcttccttccttcctcgtttcgttaaccttctaattcaattcattcctcacttccttttccaaccgaaccttttctccgataatcagagagagataataatggattggggaaacgtaaccgcggaggatctgatcgacgcgctccgtgaggtggattggtcgtcgccgccgcgccctctgtcggaattcttctcgcgattcaccgttcccaggtcttcctccaaatggaacagccgcctcaaatgc

SEQ ID NO: 83998 - DNA, 265 bp, Glycine max
  Clone ID: 700956124H1
aaacaccaggctttcatcgtggaaggtgaccttaacgacacccccctgcttgagaagctcttcgacgttgtccccttcacccacatcctccacctcgccgctcaggctggcgtccgctacgccatgcagaacccccaatcctacgtcaccgccaacattgctggcttcgtcatccctcctcgaggctgccaaatccgccaatccccaacccgccatagtctgggcttcatccagctccgtctacggcctcaacacccaaaaccct

SEQ ID NO: 83999 - DNA, 266 bp, Glycine max
  Clone ID: 700956125H1
atagtataatactaccccctcttgtgtggtgttcatattcttcaaagtccaaagtagcttctcactgcagattctttcctctttttttatagtacagtactaggcatttgatgaggacataacggaagggcttatataagtttatgtttcaaatggcagtattgataggataaagattgagttttcgttaattgttaccaggtgatacctaaatggtaagctgacctaagcgaaaatttgttccattctttccaatttcttaaaag

SEQ ID NO: 84000 - DNA, 263 bp, Glycine max
  Clone ID: 700956126H1
ctttttacttcccctatggctcgtcactccttgctcttagacctcctcctcttcgccgccgtggccaccgccgcgatggcggggccgcgtccgacgccgacgacatcctgatccgtcaggtggtgccagatgttggcgaagccgaagaggaggacaacctgctgaacgccgagcaccacttcgcgagcttcaaggccaagttcgccaagacctacgccaccaaggaggagcacgatcatcgcttcggcgtcttcaagtccaac

SEQ ID NO: 84001 - DNA, 262 bp, Glycine max
  Clone ID: 700956128H1
cagtttcatcattttttctttttttctctcttttggtacattggaaagaaagaaaggaagcttcaatttcttccaataaagcgtgtttttgaacgtgcttttaaggtatatatatatatacataactacatataccaaaaaactgatttgcagctgaaattgctttcgttcattagtatttagtttttcacaatctagggaagacatgggagaagtggctgatgaaggtcaatatttcagatcagaaatagctctattgaat

SEQ ID NO: 84002 - DNA, 264 bp, Glycine max
  Clone ID: 700956131H1
gaaatttaactcgaccttgtatgatgaatgggttaacaagggcaatgcaccggcactgcccgagactcttaagaattacaacaagctggtgtctcttggcttcaagattatattcttgtcaggaagaacactggacaaacaggccgtaacagaagcaaacttaaagaaggctggctaccacacatgggaaaaattaattctcaaggatccacaagatccttccactccaaatgcagtttcatacaaaacagcagcgagagagaa

SEQ ID NO: 84003 - DNA, 263 bp, Glycine max
  Clone ID: 700956132H1
ggaacacaccaaagttttctcccaaaccaaaacattcaattaggaagagggttggacattggtgaaccaaaccagtttggtgcattgaataattccacttctcactcttcagcagcatttgagagcatcaacatgcagaacccaaagaggtttgctgcacaattgctaccagactttgtggcctaaataagacattgaagaggggataagatcatagttggtgacattggttatatgggtctctcatattttcttctaatcca

SEQ ID NO: 84004 - DNA, 263 bp, Glycine max
  Clone ID: 700956133H1
ttctgtgtctgtgtttgcggatgaggattccgagcgagcgacctacttcgtttctcggaactattgagtcatcatgggtaaggaaaagactcacatcaacatcttcgtcattggacatgtcgactctgggcagtcaactaccactggtcatttgatctacaagcttggaggtattgacacgcgtgtgattgagaggttcgagaaggaggctgctgagatgaacaagaggtcattcaagtatgcctgggtgcttgacaagctca

SEQ ID NO: 84005 - DNA, 242 bp, Glycine max
  Clone ID: 700956136H1
gtcatggtttcgatctgaggttttggcgctctcgagttcgttttgtagcatcatcatcatcaccataccttgttcagattctgctcactttcaccacaacggctttactatttaccgcgtttcgttttcgtgtcaccgcaaataatgaaaggaggtgttccctgtatccactcctcgtcagggaagatctgaagcagtgctagctgctcacgtcctgtaatggacgtgaggttctagatcgc

SEQ ID NO: 84006 - DNA, 261 bp, Glycine max
  Clone ID: 700956137H1
atggcaacagaaacaaaagtggcagtattaggtggcatcaccgaagtgcagggagctgccaacagcgtcgagatcaacaatctcgctcgctttgctgtagaggaacaaaacaaaagagagaattcagttctggagtttgtgagggtgattagtgcaaagcagcaagtggttgctggagtgaattactacataacattggaagcaaaagatggtgagattaaaaatgagtataaagcgaaggtttgggagagggaatcccaa

SEQ ID NO: 84007 - DNA, 137 bp, Glycine max
  Clone ID: 700956138H1
gtttttaacatggtcaatttaagttgcatgtgcccatgatgcattagcaccatgcatgtatgtttaatttaaacataataatatatgctatattgaggttttgaaaaaaaacaaaaaaaaaaaaaaaaaaaaacaaa

SEQ ID NO: 84008 - DNA, 265 bp, Glycine max
  Clone ID: 700956139H1
gcatttccatatatcagtccatgtcctccttaatgctcaatggagctcatcaaaatccaaacctcattagtggcatagctccaaatggccttaactttcacaacaagtgtttattccaaaagggtgtgctgtctcatggtaacaagttaagggtggtcagaaaaaacttcactcccaaaggcagcatgtcagcatcatcatcatcatcatctaggcctggttctcagccaaggttcatccagcacaagaaggaggcattttggtt

SEQ ID NO: 84009 - DNA, 153 bp, Glycine max
  Clone ID: 700956140H1
cacacagcattagtatgtatcagcaacaagggtcagatccagcaaagcagtcaccggcaaccggttttccggtgagctatagcagttcaacaacgtgttcggccaacgaggcttcctacgctccagtcccacctccccagcccaaacctcttg

SEQ ID NO: 84010 - DNA, 184 bp, Glycine max
  Clone ID: 700956141H1
gtcggaaaccaaaccccgactaacctctctcccccaccttcgcgttctgattcagctgagagtggttgggctctgcaaaaattagctgcatgagctggtttgggaaactccgtttattctccaatttcaatccctttcacttcattacttctttgttaatttttaccctccatttttcacccca

SEQ ID NO: 84011 - DNA, 261 bp, Glycine max
  Clone ID: 700956142H1
gttttgatccatgccactgtccaaaagattgtttttgatacaaaaggaaaaagaccaaaagctacaggggttattttcaaggatgaaaatgggaagcagcatgaggcatatctaggaaatgacaggcagagtgaggtgattgtgtccagtggggcacttgggactcctcaattgctattgctgagtggaattggcccaaaagcagagcttcagaaattgaacatccctgttgtgcttgataatcaatttgttgggaaaggc

SEQ ID NO: 84012 - DNA, 262 bp, Glycine max
  Clone ID: 700956144H1
ccaagtgttgctatcaacggaggagcgcccacactggaaaaaaaaatctccggcgattgttccaccgaacctcttccgttctccgccccgatcctggattcaatcgtcgattccagtttctcattctagttgatcgagttcgtaggtttttatggtgcttcgttggacacacggtggcgatttgcattactcagtgggtggtggtggcaccgtgaattattgagtctgattacactcgctttgaaaaatcgaagagagaaat

SEQ ID NO: 84013 - DNA, 261 bp, Glycine max
  Clone ID: 700956145H1
ggcaatggcaatggcagggaggagaatgatgtggcgggggagagctgccgccaccgtcagtccccgaggcggtcgtctcagggaaggagaaggactccaagtagggaaagagaccaatccaatggcagagaaagggaagtgagtagatctcctggtagaagatcatctgacaccaccaatactacaaatgcaagcaacaacaacaacaacacaagttctaggcctgggaaaatggtgtctgttccagccactgtttcatct

SEQ ID NO: 84014 - DNA, 123 bp, Glycine max
  Clone ID: 700956146H1
gtttgtgttgctctgttatgctgctcctccctgtttgatttcaaggtatttgcccgaatcttctttctcgaagggtaaaggataaagggatgatctacacagcaattgacacgttccacacaa

SEQ ID NO: 84015 - DNA, 247 bp, Glycine max
  Clone ID: 700956147H1
cgcaaattaaagcgcaaaaaccattctccttcggtgctcttgaaaacatgggaaaacagagcacagaattctctgccctcaactgcatcgacctctccaaccctgacatcaaccaatccgtcaatttactcaaacaggcatgtttggattccggttttttctacgttgtcaatcatggaataagccaggaattcatggaagaggtttttgcacagagcaagaaattcttctctcttcctcacaagga

SEQ ID NO: 84016 - DNA, 264 bp, Glycine max
  Clone ID: 700956149H1
ttcagagaggtccttaacttgattaagcctgttgcatctgttaaaaagttatcactcacttcacatgtagcctcagatttgccaatgtatgccattggtgatgaaaaacgtctcatgcaaactattctgaatgttgttggtaatgctgtgaagttctcaaaagagggttgcatttccatcactgctttcgttgcaaagcctgaatcctttagagatgctagaattcctgactttcttccagtgccaagtgataaccacttttat

SEQ ID NO: 84017 - DNA, 263 bp, Glycine max
  Clone ID: 700956150H1
ttcttcctctttcaaactccatcgcagattcttcgctcctttccattgattcaaaacatggctaccactcctgccagatctttcctccaagtcgccgcaacggaggaggctgcgccgcctctcagagtcgtccagattgaaggactggttatcctgaagataattaagcattgtaaggaccactcgccttctttagtcactggacaacttcttgggttggatgttggcagtgttcttgaagttaccaactgcttcccctttcc

SEQ ID NO: 84018 - DNA, 264 bp, Glycine max
  Clone ID: 700956154H1
gcaatgtgaaactgacaggttaactcacttctacacattcattctcatgccagatgccacatacagtgtcctggttgacaatagagagagagattccggaagcatgtatacagattgggatattcttcctccacgaaaaatcaaagatgtcaaggccaaaaagcctaaagactgggaagaaagagaatacattgaagaccctaatgatgtcaaacctgagggatatgattcgatcccaagagaaattcctgacccaaatgctaa

SEQ ID NO: 84019 - DNA, 259 bp, Glycine max
  Clone ID: 700956155H1
gcccgtgagagtttaacgtcgaatcagaggcgtagagtgtagggtgaatgcgagatggacgctcccctgctgctggacaaaggcgagggaggcggcgctggtgacggagaacggcgactacgtggcggtgagggagctgaaggaggtgaagaaggtgttctggattgagacgaagagagtgtggcagattgcgatgcccattgttttcaacatatggtgtcagttcggtgtgaattccgtgaccacaatgttcgttgga

SEQ ID NO: 84020 - DNA, 129 bp, Glycine max
  Clone ID: 700956157H1
ctcctccgcaatgcgccaccgccgacgaagagttacttcaaataactggtggaattttggctgttaagaaagcgctgatttctgtatctcattgtcttcaagattgtccgccattatgcaaagttccag

SEQ ID NO: 84021 - DNA, 260 bp, Glycine max
  Clone ID: 700956159H1
tgagaatcttatggagcttctcataatgattgatgcctgcaggagggcttcagccaaaaatattactgctgtcattccatattttggatatgccagagctgatagaaagacccaaggacgtgaatccattgctgccaagcttgtagcaaatttaattacagaagcaggtgcaaatcgtgtacttgcttgtgacctccattctgggcagtccatgggctattttgatattccagttgatcatgtgtatggccagcctgtta

SEQ ID NO: 84022 - DNA, 261 bp, Glycine max
  Clone ID: 700956160H1
ctggatatcgggtacggactgctgcacatggaccggagtagaatgccactataacagcacccgggtccaaagattattcttaacgggtcaaaaacccgaaaccatcttatcgggtaccatctcacccaccctctcaaaactcaaactcctcgatggactctacctcataaacctcatcaacatttcgggtcccttcccaaattttcttttccaacttccaaatctccaatttatctatctagaaaacaacaatctctcggg

SEQ ID NO: 84023 - DNA, 260 bp, Glycine max
  Clone ID: 700956162H1
caactagggtagggttccctccgccaaacccaaagaaagagtagaagaaacctacaaaactcatctctataaacaactccgtttgtcactccggcggctttagcaatcactccctccgttttgcgttttggattcatttatctgctgctttatcttaaaggccaagcgataaataacctctctctctctctctctctgtgagattgagaatccgatccttcgtttccgaaattctcgcgagatggacgagaacctgctcg

SEQ ID NO: 84024 - DNA, 257 bp, Glycine max
  Clone ID: 700956163H1
ctcgccatgttccttatcaagacatggagacagacggctttcggtgtttttgggtacctgaatttcaccaaagctggcttccttgatcattctaagaaattcaacccagaggacatggaattacgaataccagggaagaattgcattgttactggagctaactctggaattggctatgcaacggctgagggtcttgcaaagcgtggcgcaactgtctatcttgtatgtcgtaataaggagagaggagaggctgctct

SEQ ID NO: 84025 - DNA, 260 bp, Glycine max
  Clone ID: 700956164H1
agcgggtttggtttcatctaatactctcagggagaataatttccatcactttgagtatatgtgtaccaagaaagatccatttttttctgttaacaagactgcaatttcactcttttctgaaaattatgagaagcctgatcaactgaaatccgagattaatagttcaactaaattgattgttactgggcatggtcttggaggagcagttgtttctctctttactatatcgctattaaatagcattggttctggaaagaatc

SEQ ID NO: 84026 - DNA, 137 bp, Glycine max
  Clone ID: 700956167H1
atttgttctccgaaaatggttgatttacattggaaatcaaagatgccaagttccgacatgccttccaaaactctaaaactctctctctccgacaacaagtccttaccctctttggaactacccttccgcaccacaga

SEQ ID NO: 84027 - DNA, 258 bp, Glycine max
  Clone ID: 700956168H1
aaggagcaggaactcaaagcgcttgaagctcgaagggcgaaggctattgaggaattggagcaaaagaaagcggaacgcaaggagagggctcggaaaaggaaattgggcttgctagaggatgaagataactccaaattgagtgacatggatattttaaaagagagtaatgattttgctactgttgggaagactagagatagctcagatagggccttttacaaagatttggttaaggtcattgaagcctctgatgtctta

SEQ ID NO: 84028 - DNA, 259 bp, Glycine max
  Clone ID: 700956169H1
gagaatggctcccaagggtttaacctttctggctgtgttaatatgcgtttcagcactgtcactgagtccttctgttgcgggggaagggcaaaataatggccttgttatgaacttctacaaggaatcatgccctcaggctgaagacatcatcacagaacaagtcaagcttctctacaagcgccacaagaacactgctttctcctggctcaggaacatcttccatgactgtgctgttcagagttgtgatgcttcactgttg

SEQ ID NO: 84029 - DNA, 259 bp, Glycine max
  Clone ID: 700956171H1
tgctatcctggcgttagttcaaatgccattcatctgctctggaaatggcagcgaaatgaccgtaattcaactggcaaggccactgccagtgtgcaaccccagttgtggcaaccttctagtggcatccttatgactaatgacattactgataacaataccgaggatgccgtcccctgctttgctctgtcgaaaaatgattcttatgtaatgtcagcatcaggagggaagatttctctgttcaatatgatgacttttaaga

SEQ ID NO: 84030 - DNA, 178 bp, Glycine max
  Clone ID: 700956173H1
atcatatcgcaaattcgccaagaaactggcgtgaaacttaggatcgaggaagctgttcccgggtgtgatgaaagggttatcactatctcaggttctgaaaaagagactgaagaagataacactgaacagggaaaggaggttaatgataatgatgatggtggaagcgaggggaaggatc

SEQ ID NO: 84031 - DNA, 256 bp, Glycine max
  Clone ID: 700956174H1
cgtaacctctgtaactgtggagaacgtgacattccctcccaccgtgaagcctccctgctcccccaacaccttcttcctcgccggcgccggcgtcaggggcctccaaattcatcacgctttcgttaaattcactgccatctgcatttacctccaatacgacgccctttccttcctctccgttaagtggaaaaccaagtctgctcaccagttaacggaatccgaccaattcttctcagatatcgttacaggtccattc

SEQ ID NO: 84032 - DNA, 257 bp, Glycine max
  Clone ID: 700956177H1
cccacttgaattgatggtgtggaaaacagtgagtacgttggtgttggtgcaagatttggccctacattggaatcaaaagaaaaacgggccaatctttctagagttgtcatggctgatccgcctgattgctgtacaaagcctaagaataagctcaccaacgagatcattttggtgcaccgaggaaaatgtagtttcacaaccaaggcaaatatagctgaagaagctggtgcttcagccatcccattaataaactaccg

SEQ ID NO: 84033 - DNA, 256 bp, Glycine max
  Clone ID: 700956178H1
cgggaggttgtgaagaaggggtgcgaggctctgcatagatgcgaggacatggtcaataacctaggtttgttctctcccaacgagaccaaagaagatatcagcaccaccaatctcaagtacattctggtgccattttatcttgcggagttgacagaaaaattagcacaggatgacaggatacatattctaaaggcttcccaggcaaaactaaaggagtttatttcattttgcgaacaatggagctggtcccaaaaga

SEQ ID NO: 84034 - DNA, 256 bp, Glycine max
  Clone ID: 700956180H1
caatcttgcaaggactattgggacctgatcacaataaccaaacccaacaacaatctatgagttttccatatcatacaacaatttatggattaaactctaatgaattggttccttcttggtccaaagttcctcaattcttgagagcttcccctcctaaaccaccacccaataaccagttgcatttcactaaccccgcaaccttttggaatgcttctgaggctgcaaacatcaaagatgttcgccccagcttcttccc

SEQ ID NO: 84035 - DNA, 217 bp, Glycine max
  Clone ID: 700956182H1
ctcgagccgctcgagccgcgcgggtgaggtagaacccttccacggtggtgactgcgcgatgggtgcctacaagtatgtttcagagctatggcgcaagaagcagtctgatgtcatgcgcttcttgcagcgggtgaggtgctgggagtataggcagcaaccttccattgttcgcttgacaaggtcgacccgccctgacaaggctcgtcggttgggcttc

SEQ ID NO: 84036 - DNA, 258 bp, Glycine max
  Clone ID: 700956183H1
agaaaatgaagaacaatgccattgtttgcaacattggtcactttgacaatgagatcgacatgctggggctggagaactaccccggcgtgaagcgcatcaccatcaagccccaaaccgacagatgggtcttccccgagaccaatgtcggcatcattgtcttggccgagggtcgtttgatgaacttgggatgcgccacaggacaccctagttttgtgatgtcctgctccttcaccaaccaggtcattgctcagcttgagt

SEQ ID NO: 84037 - DNA, 237 bp, Glycine max
  Clone ID: 700956184H1
gaaaaagctactgatttttcttctcatcgaggttgttttctttgctgccgttgctcttataacaatgctggcattgcatggcactcgccaaaggtcgttagtggttggtgttctctctgatatcttcaatgttatgatgtatgtctcccctcttacaattatggcaaaggttataaaaactaagagtgtgaaatacatgccaatctggctctctctgggtaacttccttaatggtgc

SEQ ID NO: 84038 - DNA, 258 bp, Glycine max
  Clone ID: 700956185H1
ggatttcgcacgtagctagctacagaagacaaaggagccttgagtctcgagatcttgtcagatcggaacgcaacctcaacttccaccgagattgctttgtgtgttctgggaagggaagttactggcatacaggttatggaaaagaagccaaatggtgccatagcggcttcaaatggcagtttaagtgatagaatgcgtgtttctcccaaaattgcagcaatggttcaagcaatggatcatgagataaaggaatctgct

SEQ ID NO: 84039 - DNA, 189 bp, Glycine max
  Clone ID: 700956186H1
aaaagaagaaggtgtgggggagggaagaaatttgaagcaacagcaaagaaagtttccaatttgatgcttattttttaccatatggcaatgtgagtccatgtcacttgcctaggccatcacctaccactgataattccatgccttgttattaacccaaccacaccatttccctcttctcacaatttcatg

SEQ ID NO: 84040 - DNA, 270 bp, Glycine max
  Clone ID: 700956187H1
agtggactttatattcaacaagttttctgtcaaacccgggtcagaggaggctcagatcatgaagaatactattagtgagtgtgaagagggtggaatcaaaggagaggaaaagtactgtgccacttcgcttgaatccatggttgatttcagcacttccaagcttggaaataatgttgaggttgtgtccacagaagtggacaaggaaacgggattgcagaaatacaccgtagcaccgggagtgaagaagttatcaggggacaaggctgttgt

SEQ ID NO: 84041 - DNA, 261 bp, Glycine max
  Clone ID: 700956188H1
cccttctcttatattcaaaatcacgttcacctttctcccttcactcatctcacaaaccatgagcacaatccaccaaacacacactcgttgcgaaggtgaagacaaagagttcagtttctggggctcatcaaacatcataccttctgaaaatgattgtgatcaaccacaaggtaatgaatcaaggctcaaaaaggaagcatactttggagaaacacaccaaagaaaaagccttaaatatgagtattcacggttttgttcaac

SEQ ID NO: 84042 - DNA, 256 bp, Glycine max
  Clone ID: 700956189H1
gttttcaagtggaaaaaacctggagatccccacgagtttgagcaatgagatttggatgcgcggttttagttgtgatcaataagtcgatagttagaacaatagtcttggtataaggaccttgccaataattttttagttctgattcacagagctaagacagttccgtcttagactttaaaagttttgatatttagctttaatacttgaagtttacttccaattttatggggtatccccaaaacatttcatactcttt

SEQ ID NO: 84043 - DNA, 254 bp, Glycine max
  Clone ID: 700956190H1
atctgatttgatttcggagctgtgggttttattgaaagaaaaaaattagaagcaaaaatgatgcagtcgttgatgagcatgaaggcttacgtgggtacgaggttaccgattttaacgaattccgagacgagtacgaggaagcagcgcgtgaattgtccgaaccgtaggaatgtgatggtttcgtgcggttcggagaggaatgggaacgaaggaataggttcgaactcaggttcgtttatgtctccgagccataa

SEQ ID NO: 84044 - DNA, 95 bp, Glycine max
  Clone ID: 700956192H1
tgaaaaataagggtgctgttgctttcttgatttttttgtgtgcagttggaaatttttggattagtttatcttgtggatcactctagctttttgct

SEQ ID NO: 84045 - DNA, 254 bp, Glycine max
  Clone ID: 700956194H1
ggtacagtcaagtacaaaacgcaataccctaatttgtttctctgtctctgtctctgtctctctctccattcgtgctttcagctccggcaacctctcttccggcgccgccgctatctcggccgcgcaccaatcttcaatttgattacttgggtcaacgatttctgtcattctcaatcatggcaactagacttcagtttgaaaataattgtgaagttggagtcttctctaaacttaccaatgcctactgtttggtt

SEQ ID NO: 84046 - DNA, 252 bp, Glycine max
  Clone ID: 700956195H1
ccactattgcacttcttcctcgttctccctctttttcttcttcttcgctaaacccttttttctatctcactaacacaacaatgggagacgagaagaagggcaagcctgctgcttccggcgtgtggtccaccatcaagcctttcgtcaatggtggagcctccggcatgctcgccacctgcgtcattcaacccatcgatatgatcaaggtgaggattcaacttgggcaaggatcagctgcgcaggtcacttcca

SEQ ID NO: 84047 - DNA, 254 bp, Glycine max
  Clone ID: 700956196H1
ccaaaacaatttgctcacaaaggaggaaaaatggcacctttcgtttccctctctttgttgcttctctttctcaaccaccccctcctttccctctcaaccaaccctgaagggaacgctctgcatgctttgagaagcaggctttctgatcccaacaatatgttgcagagttgggacccaacactggttaatccctgtacttggtttcatgttacctgtgactccaacaatcatgtgattcgcttagacttgggcaa

SEQ ID NO: 84048 - DNA, 181 bp, Glycine max
  Clone ID: 700956201H1
tcacattcaccctttgttcttttggtctaccctgtaaatggaggaggagaaacagagaggcaaagggcacagactattgctgatgccatcaccattacaaggccacataacaccatttctccacctcggtgacatcctcttctcaaagggcttctccatcaccattctccacaccatatac

SEQ ID NO: 84049 - DNA, 252 bp, Glycine max
  Clone ID: 700956204H1
cgggaatggaagagggtgacagtgaggccatttttggtgctcttaatctgaacccgcaactcttctgtaacgaagttctcaacattgtcgacgatgtgctcgacgaagctttcaatttcttctaccaggacgcatccacgaagctcaacatcgaaggcacccaaaggtcccaggatctgaaaaagggtgttgattgcgttcggctgaatgttcaatctgtttgcgacaaacaacttgctgcttgggagagtt

SEQ ID NO: 84050 - DNA, 252 bp, Glycine max
  Clone ID: 700956207H1
gaaagtttgtggcggatggagtgttcttcgccgaactgaacgaggttctgacacgtgagttggcggaggacggttactccggcgtggaggttatggttacgccgatgcgcaccgagattatcatcagagccaccagaacccaagccgttctcggtgagaagggaaggagaattagggaacttacctcagtggtgcagaagaggttcaaatttcccgagaacagtgtcgagctttatgctgagaaggtcaaca

SEQ ID NO: 84051 - DNA, 254 bp, Glycine max
  Clone ID: 700956208H1
tcaattataagcatgggtttgtggaacacaacgaatgcagtgtcttgccgctttcacaagtttggtgatgaccaaaagaatctggtcttccaaggtgatgccacgtcttcttccaggggcatagtactcacaaagttagtacggtggaggaataccagtgggtggcagtgtggggagagtgttatactcttctccagtgcacctttgggaaagctctacagtggtcgcaagctttgaaaccgacttcacctttt

SEQ ID NO: 84052 - DNA, 253 bp, Glycine max
  Clone ID: 700956209H1
gaagaagaagaagcactgtgattctgattctctctccgtcgttgcaactggtgcctccgtcgttttcatccctaaccccacaccttcgacgccctattatgatatgatcgcagattagtgggcaagggctgtgggtgaggatgaatttgcaacaaattgggcagcctaaatcatctaatggatatggtcatcagaaatctgaaaaagaaggggcaactaagtctgataataagctcccatctgtaaagtcaaa

SEQ ID NO: 84053 - DNA, 89 bp, Glycine max
  Clone ID: 700956210H1
gagcaaattctcgaacttctgttgcaaattccattacctgcggaccagccgctttcacagtgtcgtctaagttctccactccacacagc

SEQ ID NO: 84054 - DNA, 254 bp, Glycine max
  unsure (1)..(254): unsure at all n locations
  Clone ID: 700956211H1
cgaacaactcatctccggcaaggaagatgccgccaacaactttgccagaggccactacaccgttggcaaagagatcgtagatctgtgcttggatcgcgtccgaaagctcgcagacaacggcactggtctccagggctntctcgtcttcaacgctgtcggcggtggcaccggttccggtctcggatctctcttgttagagcgtctctccgtcgattacggcaaaaagtccaaattagggttcaccatttaccctt

SEQ ID NO: 84055 - DNA, 254 bp, Glycine max
  Clone ID: 700956212H1
attcagatcttagggtttcaatttttttttctgtggagccccattggccatagccgccagccagagaagagtagaagccttcgatcctaggttttctttccccccctttctcccaaatcggacctttttcgcttctcgattcgcttccgtagccgggcgatttgaggacccagaaaagaacgaaccgaacgttttatattttttcggataatcaatcgaagatgtctcgttgcttccctttcccccctcctggg

SEQ ID NO: 84056 - DNA, 254 bp, Glycine max
  Clone ID: 700956213H1
cttgcttccacttctgattcagaaactcttaggcattccacattctcaaccccggaccctatgagcagagcgaaaatgacaaccaccttcgcgaccgtcgcaggactcggtggcgcattactgtcatccacctcatctcgtctcagctcagggtttgtgaaatccccagtgattgctaggaatcccttgaggcaagctgtggcaatgggaaatgggaggattacatgctttgagaggaattggctgcgggcaga

SEQ ID NO: 84057 - DNA, 254 bp, Glycine max
  Clone ID: 700956214H1
cccaatctcaatctcattcattcctccaactccaaaccagattcccccctctctctctctctctctactgaacaaaaagaaaaagtgagagttcagaatttttaaatctcacctatttaactacctcgcataaaaattcacgtaacattctcttctgtgtcctaatcggaactcgcacaaattttgttatagtgatgtgatgtcattttagggtttttgaattgcgatgggtctgggaaacgatgacgatgacg

SEQ ID NO: 84058 - DNA, 252 bp, Glycine max
  Clone ID: 700956215H1
ctcgagcgaatcggctcagggcgtaccgtgtacgtatctgcagaaagtgaatgaaaggtaatgggggaagaagggtgcaaggtatgtgttacaggaggcagtggttacattggttcctggctcatcaagaagctactggccaagggctacacagttcatgcaactctcagagacttgagagaatgagtcaaatgttggcctcttaaagagccttccacaatcagaaggaaagatggtgctgtttgaagctga

SEQ ID NO: 84059 - DNA, 255 bp, Glycine max
  Clone ID: 700956216H1
ctttctctcttctctctccacccaaaccctaactcccgaccctgttcccctctcgtatccgtcatgaaaggaggaaagtccaagaccgaatctaagagagccgatcccaaacttgctgtgaataagaagggagccgccaccaaggctaggaaacccgccggcaaggggaaggcagcgaaagaccctaacaagccaaagaggcctccaagtgctttcttcgttttcatggaggagttcaggaaggtattcaacaaa

SEQ ID NO: 84060 - DNA, 77 bp, Glycine max
  Clone ID: 700956217H1
ctcgagccgattagaagtataacatgagtgatttgtagccttatggcaaggttggatatgaaggcttcctcatattc

SEQ ID NO: 84061 - DNA, 252 bp, Glycine max
  Clone ID: 700956218H1
ctttctcttttgcattctctctgaattcgtatgccatggagacacccggtaacgagcatgtggtgggtggcgcagaacccaacgacgtcgttacgcccttttcccacagagaagaaccggacaattcccaacccctcaccggcgacggtgccagtcccggaaagatatttataggtggtttagcgagagaaacgaccattgcccaatttatcaagcactttggtaagtatggtgagatcacggattcagtta

SEQ ID NO: 84062 - DNA, 252 bp, Glycine max
  Clone ID: 700956219H1
ggaaagtcaaggtagaggccggtttcttggatctgtacacggacagggagccagggtgcgggtactgtaagtactctgcgagggaacaggttttgggagaggtgaagcggttgatggagaagtatgcggacgaggaggttagtgttacgatagccggacatagccttgggagtgcgatggcggtattgagtgcctttgatattgttgaaactggggtgaatgtggggaaggatgggagaaaagcgcatgttt

SEQ ID NO: 84063 - DNA, 98 bp, Glycine max
  Clone ID: 700956220H1
gaaatgtggaagggcaacaatggagcccattgaatccgaatcagttagttcctccgccaaagaccacgaagtgggtgaacctgcttccactgttcacc

SEQ ID NO: 84064 - DNA, 251 bp, Glycine max
  Clone ID: 700956221H1
ggtgtttttgaaacgtgcttaaaccgtgatgggtgctgttgtggagtgctacgcgccgcctcgcacggcggtgctgtccctcaacacgctgccgttagggttccgtttccgtcccaccgatgaggagcttattgactactacctgcgctcgaagatcaacggaaatagtgacgatgtttgggttattcgtgagattgatgtctgcaaatgggagccttgggacttgcctgatttgtcagtggtacggaaca

SEQ ID NO: 84065 - DNA, 231 bp, Glycine max
  Clone ID: 700956222H1
ggagtgtccaattgagggtgaacaatgctgaattggctcaaagatctgcaccagcaatggaacatggtgggaagttacctagagtctcaagcagtccattgctcaaaacacttggatctcaaatgggtgcccaagagaacaagaattcagcaattcatcaggaacaaggagaaattggaaggggcaaatccccaggaggatccacaatttccgggccaaccccaaattggg

SEQ ID NO: 84066 - DNA, 103 bp, Glycine max
  Clone ID: 700956223H1
gtttttaacatggtcaatttaagttgcatgtgcccatgatgcattagcaccatgcatgtatgtttaatttaaacataataatatatgctatattgaggtttta

SEQ ID NO: 84067 - DNA, 251 bp, Glycine max
  unsure (1)..(251): unsure at all n locations
  Clone ID: 700956224H1
cgtcacgnagacatcttcgcgagcgactcgatcgagctgttgcgccagtgcggaatcgacttcaagaagaacagcgagaatggaatcgacgtgaaccggttcggggagctcctcatgtcctccgggatcgtgttgaacgactccgtgcgctgggttaccttccacagcggctacgatttcggctacctcctgaagctgttgacatgccggagcttgccggacacgcaggccgggttcttcgatctgatcaa

SEQ ID NO: 84068 - DNA, 252 bp, Glycine max
  Clone ID: 700956226H1
gtggggaagagttagtttctcttctcttcgatggaaggcggggaagaggttctcccttcggccactgccacctccgccgccaccggcaatcccaccgcttcgcctcctccgctcgcttttcttctcggtgctccccctctcgctgctgcctcggacgacgtcgttacccaacctgaaattcacgcgctgatttcagacgaagagcacgatcacgagcatgaacatgacgatgacctcgagcacgagcacgat

SEQ ID NO: 84069 - DNA, 252 bp, Glycine max
  Clone ID: 700956228H1
cgcaagtattcctccaatctccgtcgatcaccaccaccatgtcgtggctcctccgatccaccaagtctaagctcctctcttcctcttcctcttcttctctttctagaaccttcccctctctccctcgccctcagatcggagccatctctcccctccccgatcttttccaccgcaacaccgccattatgcctttcgcgaaggaaaacgcttccggtggaaacttgaccggtcttcccaaagttcccgcgaata

SEQ ID NO: 84070 - DNA, 252 bp, Glycine max
  Clone ID: 700956230H1
ggcgagtagggaagagcgaagagtgaggagaatggctcccaagggtttaacctttctggctgtgttaatatgcgtttcagcactgtcactgagtgcttctgttgcgggggaagggcaaaataatggccttgttatgaacttctacaaggaatcatgccgtcaggatgaagacatcatcacagaacaagtcaagcttctctacaagcgccacaagaacactgctttctcctggctcaggaacatcttccatga

SEQ ID NO: 84071 - DNA, 112 bp, Glycine max
  Clone ID: 700956231H1
cttaagttagaaggacttgagttgttataattaacggaaggaacccatatacaactaagaagaagatgaagaagaagaaggtctctcaatcaaagtgattgaaaagacccaa

SEQ ID NO: 84072 - DNA, 244 bp, Glycine max
  Clone ID: 700955578H1
gcagaggccactcaagagaaccattgcaatcgccaagcaacgcgcgtgcttttcctctctcctaccctccgccgctgccgccgccgccgccgataccgtcgcgcctccgcagctccccccgttcgatcaccagccgcacccttacaacggtccctccgccgatgaagtcttcgccaagcgcaaaacgttcctcggtccttccgtcttccactactataagaaacctctgaatatcgtggaaggg

SEQ ID NO: 84073 - DNA, 241 bp, Glycine max
  Clone ID: 700955579H1
gtcagtagtatgtggaagttgaagatagcagaaggaggagatgggttaatctctgtgaacaatttcattggacgtcaacactgggagtttgatcctaatgctggaactccacaagaacgtgctcaagttgaaagggtacgagaggaatacaaaaagaaccggttttgcattaagcaaagcggtgacctactcatgagaatgcagctcacaaaggagaaccgtgtgggcccattctagcaag

SEQ ID NO: 84074 - DNA, 252 bp, Glycine max
  Clone ID: 700955580H1
gttgagtagttcttcatcatagtcttaaacattaaaccttagcaaaactcaacaatgctagacatcaaaggctacctcgtactcttcttcctatggttcatatcaaccattctgatacgttccatcttcaagaaaccacagcgtctaagactcccaccgggtcctccaatttcaatacccttgctgggacacgcgccatatctccgttcactgctccaccaagcattgtacaagctatcactgcgctatgga

SEQ ID NO: 84075 - DNA, 266 bp, Glycine max
  Clone ID: 700955581H1
atccgcagctgcttttattcgcaccgcaaacagtgagccatggccgtcggaaagaacaagcgcatctccaaggggaagaagggtggcaagaagaaggcagctgatccctttgccaagaaggattggtatgacattaaggctccttctgtttttcaagtgaaaaatgttggcaaaaccctcgtctctcgtactcagggtaccaagattgcttctgaaggactcaagcatagagtgtttgaggtctccttggctgatcttcaagggga

SEQ ID NO: 84076 - DNA, 252 bp, Glycine max
  Clone ID: 700955582H1
gggagctcattgaagagacaaaaaacaatggctgaaacaaagttgagcatgatgaaggacaaaagatggtcactccgtggaatgactgctctcgtcacaggagccacccgaggcatagggcatgccattgttgaagaattggcagactttggagcaactgttcatatatgtgcacgtaatcaagatgatattgataagtgtttagaagagtggaaaaacgagggacttaatgtgactggctcagtatgtgat

SEQ ID NO: 84077 - DNA, 257 bp, Glycine max
  Clone ID: 700955583H1
ctttactgacctttttgatttctttccgttgactgcattggttgagtccgaaatattttgtttgcatggtgggctttcaccttcaattgagactcttgataacataaggaacttcgatcgtgttcaagaggttcctcatgaagggcccatgtgcgatctgttgtggtctgatccagatgataggtgtggctggggaatttctcctcgtggtgctggatatacatttggccaggatatatccgaacaatttaatcaca

SEQ ID NO: 84078 - DNA, 254 bp, Glycine max
  Clone ID: 700955584H1
ggaatcaatcaatccctcatctcattgctgagatctgcaagctggctatggactacgaaccctacgacagtagcggaactgatgatgaccttccaccaacccatcaaaacagaatttccaggggaggaggaggacgtctcgctgggaatgggagatctgctgttggttcaattccttacccaaggatgtatggtgaaattgatatggagacccaaattcatcagcttgagcaagaagcatacagttcagttcta

SEQ ID NO: 84079 - DNA, 246 bp, Glycine max
  Clone ID: 700955589H1
cgaggagtgagaccggatcagcaattggttaagattgtacatgatgaacttgtacgattgatgggtggagaagtttctgaactggtttttgccaaatctgggcccactgtcattttattggctggacttcagggagttgggaagacaacggtttgcgcaaagttggcaaattatctcaagaaacagggaaaaagttgcatgctagttgctggggatgtttacagacctgctgctattgaccagctt

SEQ ID NO: 84080 - DNA, 246 bp, Glycine max
  Clone ID: 700955590H1
caaatcttgatgttttcagcaacatttcctgttactgtaaaggatttcaaagataggtatcttcgaaaaccttatgtcatcaaccttatggatgagctaactctgaagggtattactcaattttatgcattcgtggaagagagacagaaagtccactgcctaaatactctattttctaagctgcaaataaaccagtctatcatcttctgcaattcagtgaatcgggttgaacttcttgccaagaaa

SEQ ID NO: 84081 - DNA, 244 bp, Glycine max
  Clone ID: 700955591H1
ggactaatcataagagggtgggcgcctcaagtgttgattcttgaacaccaagcgattggcacgtttgtgacacattgtggatggaattcaacgttggaagcagtgactgcaggggttcccatggtcacttggcctattttcgccgaccaatttttcaatgagaagttggtgattgaggtccttaaaattggggtacctgttggtgctaaaacatggcttggaatgcagggagatagtatttcat

SEQ ID NO: 84082 - DNA, 246 bp, Glycine max
  Clone ID: 700955593H1
tgggtgctctggatcacatctctgagctctttgactgctcccataccagctccaagctcaagaagaagcgcaaacaattccagacggtggaggtgaaagtgaagatggactgcgaagggtgtgagagaaaggtgaagaaatcggtggagggaatgaaaggggtgacagaggtggaggtggatagaaaggccagcaaggtaactgtttccggctatgtggaaccctcaaaggtggtttctcgcatcg

SEQ ID NO: 84083 - DNA, 244 bp, Glycine max
  Clone ID: 700955594H1
tgataagcctatggcggtggtaaaggccgttgtcgttcctcacgcccttatggttttgtaaatcaccggcatcgcgtctattacagctacatgcttatgaatggcgtggcgcgagcttggaaagaagagaatatagatgaatttgactagagctttgtcgacaacaccatttagacatgtggcaggatcaaattttgcatccatctttactgtgcaatctgtttgtgcatcagcaagatgtgtg

SEQ ID NO: 84084 - DNA, 74 bp, Glycine max
  Clone ID: 700955595H1
cacaaactttaaagatgcaaaggggaaaactaggctagctaaagatttctagcatttgtttgtatgactagttg

SEQ ID NO: 84085 - DNA, 259 bp, Glycine max
  Clone ID: 700955602H1
cccgaaactcatcaacagcccaagaggatgtgaagctaggcacttgctgaggaggaattttcgcagaaacttgttgtgcactcctattaggaggctccgagtgacttttttcattgtctttgaatcacctgagaaaaaggaatctctgcagtttggagagctggaatggcttacagatgtgggtattttcggcgaacaatttgctcaggaagccttggctgcagctgaagtacctcagcttcccgaaactcataacagt

SEQ ID NO: 84086 - DNA, 256 bp, Glycine max
  Clone ID: 700955603H1
ctttcgcaaacctaattactgctattacgagacgacgcagatttagttcggattgttcgattgcgatggctaggaagatgcttatcgatggtgaagctgaattggctcaaggtggtggagaagaagtgtcgaattttgacttcgacttgtttattattggggctggaagtggtggcgttcgtgccgctagattttcatccaattttggagctaaggtggggatttgtgagcttccatttcatccaattagttcaga

SEQ ID NO: 84087 - DNA, 256 bp, Glycine max
  Clone ID: 700955604H1
ttaaaaatgaaaaatatttactgttttttgtaatttttttattctgtttaaattttaaaagtattgcctccacaaggtgaaaattcaaaaaaacctggggctgctcataatgttcgactatattcaattgcttccacaaggtatggggacttttttgatggaaaaactgccagcttgtgtgtgcgtcgtgctgtttattatgatcctgtgacaggaaaggaagatccttccaagaatggcatttgtagcaattttt

SEQ ID NO: 84088 - DNA, 253 bp, Glycine max
  Clone ID: 700955606H1
gagaaattcaaattcaatgcaaagaaattagatttttgaacgaaagctacgaactttaagttcatggaccgcttgcgtcctaggaatcgagcggtcttttctggatttacaaatgccgagattgagaaaatggagaaattgttaagggaacctacagggggatcattgggcagggaattttaccaaaaactggctcgaagtttcaactattcctctggtcgtgctgggaagcctatcataaaatggacagaga

SEQ ID NO: 84089 - DNA, 252 bp, Glycine max
  Clone ID: 700955608H1
cttctttcataaactaaaattagcttatgcacaagttaaaaccagatttgggagaagctaataggagagtttttacaaattagcttatgcaaaagctaattttagctcatgagaaaacttattttatttttcattcttattttcttctcttaaataagtgttcatggagaagtttatccaaaaaaggttctgctctgtttattttctgaatttctgttaaagcaagcaaatagttctaattgcactgcttat

SEQ ID NO: 84090 - DNA, 247 bp, Glycine max
  Clone ID: 700955609H1
tttttgaagtagatcaggaagagttcctggtgtgggcctggtacatctcccactttccttattacctgggccatttcctgaaagtcattggaagcaagggtgcgaattagctcctatatttaatgaacttgttgatcgggtgagtttggatgggaaatttctccaggaatctctctccagaactaagaatgcggatgaatttacctcaagacttttagatattcattctaagatgctacagattaac

SEQ ID NO: 84091 - DNA, 252 bp, Glycine max
  Clone ID: 700955610H1
catcatacaacattctaggaaaatatagaagggatgttctccttggcattgggggcctttacggtgcatctgctcttagcaacaccaaccctttagccatggctgcagctcctattcttcaacctgacctagaacattgttgtataactgatgatgtaccacctaaaggggtcatcgaggcacaagtctattgttgcccaccaagatcttcttgccctcctatagatttcaagttgcctaaaggaacacccc

SEQ ID NO: 84092 - DNA, 249 bp, Glycine max
  Clone ID: 700955611H1
gggaaagcactgtgaagttccctggcatttctgttagagggggtggtattaacctgcctcataacacactggcaccttgtaccacaccaacagagattggtggtaactgatctaagttgtatcttttatctttttctttgttgtatcattttcttgtgtgaataccagttgtcttcaaatagcaatgagaggagcagcacttcaattctttgaatgtgaactgtaacttactaggatactaatactcat

SEQ ID NO: 84093 - DNA, 249 bp, Glycine max
  Clone ID: 700955612H1
ggtgtgcagaagagcgtcgcagttgtaaccctaatcagaagaagcgcacttcaagcgagtgacagccaccagccatgggtcgtatgcacagccgcggtaagggtatatcctcttctgctttgccctacaaaaggacacctcctagctggctcaagatctcttcgcaagatgtcgaagaaaatatctgcaagtttgcgaagaaaggtttgaccccgtctcagattggtgtcattctcagagattctcacg

SEQ ID NO: 84094 - DNA, 249 bp, Glycine max
  Clone ID: 700955613H1
ggagcagaagaaggcaaagatagtggcagagctccaagctgtgaagcacaacagtggcaagtcctacaatcagttagcggaggagactggactcaccaacgtctatgttgctcagcttctcaggagacaggctcagctcaatccccaaactgcccctctacttcgggcagcgctgcccgacctgccccaagaccttgtttctgagatgatgagaccccctttgaggtcttatgaccctaatctcatcca

SEQ ID NO: 84095 - DNA, 251 bp, Glycine max
  Clone ID: 700955614H1
atcgaatttctcattccgcagaaaccttcaacgatggccgctgaaacgattccctaccagaacggcgtcgttgccagctccaacgattccaccgccacgggcaagaaatcgcgggagaacgaccgccgccgccgccgccggaagcagaagaagaacaacaaggcatctgaggccccggttcctaactcttccgaagagagtgacgatgcgaaagagaacaacgattcaaaacagcttgttgaacaaattga

SEQ ID NO: 84096 - DNA, 248 bp, Glycine max
  unsure (1)..(248): unsure at all n locations
  Clone ID: 700955615H1
acggagccctctcttcaggtcaccatctagactgcaatcatggctgatggaccacagcatccatcagttgttcagaagctagctggacagtcttacctggtgtccaggcttagccccaactttaactctaggaattattctgcaactggttcttacgtcaatggcggactgcactcgcctgggttggctgttggctcacctgtatctccagttactntgcatgctncagcagagaaaggagtgagtgg

SEQ ID NO: 84097 - DNA, 236 bp, Glycine max
  Clone ID: 700955616H1
gaaatatttgaaaaaggccaagaatccttagcaccaaatataactcgcaatatttgtttttccactgaccaacaatggtgttgttgtgccctttgtttggaagacaatattgaatcttttaaagaaaactaaattatttttaatagaaagttgaaaaagggtttcaaccattgtgtataagatgaaaaacaattgttgtctattaaattaatcttaattttggtatatatatattt

SEQ ID NO: 84098 - DNA, 141 bp, Glycine max
  Clone ID: 700955619H1
gttgtggttagttactgtatgctgctttaatggataggaagatagacaaccatcgtttcagttagtgcaaacaactcgtgttgttgtattttgtaggctggtaatttgggaaaaccatacatgaacaaataaatcccttac

SEQ ID NO: 84099 - DNA, 255 bp, Glycine max
  Clone ID: 700955620H1
aaggcttatggtggatacctaggcacccagagacgaggaagggcgtagtaagcgacgaaatgcttcggggagttgaaaataagcgtagatccggggattcccgatataggtcaacctttcgaactgctgctgaatccacgggcaggcaagagacaacctggtgaactgaaacatcttagtagccagaggaaaagaaagcaaaagcgattcccgtagtagcggcgagcgaaatgggagcagcctaaaccgtgaaaa

SEQ ID NO: 84100 - DNA, 253 bp, Glycine max
  Clone ID: 700955621H1
ctcgagccgaatcggctcgaggcgacgacgatccaagtgatagacactcgtcgcgatggaaagtgtagctgaatccgagcgagctctgtacccatacgtgactggatcctctgtagtcgctatcaaatacaaagatgggattctaatggccgctgacatgggaggttcgtatggatctaccctgcggtacaagagtgttgagcgtatcaagcctattggaaagcattctcttcttggtgctagcggggagata

SEQ ID NO: 84101 - DNA, 252 bp, Glycine max
  Clone ID: 700955623H1
atcactttaatcacgcactatcagtacaacaactcactcactaagctaaacaatttcatcaagcctgccatggcttcctcgtgtgcttcctctgccattgcagctgttgccatctccacaccaagttcccagaagaatggatcactcttgggaagcacaaaagcttcttttcttagtgggaggaaactgaaggtgaacagttttacagcaccagttggagcacgatccagcactacagtgtgtgcagttgct

SEQ ID NO: 84102 - DNA, 240 bp, Glycine max
  Clone ID: 700955624H1
ttgcgagttgcagagagagcaatgagtcaggaatcgtttatatagagcttcgtggctcgggggacgatggtgttagccgagtacaccgagttcactgggaacttccctgcaattgcagctcagtgcctccagaaactaccctcttccaataacaagttcacctacaattgcgaccaccacaccttcaattttctcgtcgaagaggttacgcttactgtgttgttgccaaggaatctgtta

SEQ ID NO: 84103 - DNA, 252 bp, Glycine max
  Clone ID: 700955625H1
ctcgagtcaaaggttaatgagaccaaggccatggtgaagttccagcttaagaaggtgctttgcatgggagtagccgtggggaatgttagcatggaggaaaagcaaatcttccaaaatgtacaactgagtgttaacttccttgtctctttgttgaaaaagaattggcagaacgttcgctgcctgtatctgaagagtaccatggggaaatcgtaccgtgtcttttgaggagttgttcttaaattcagtgaattt

SEQ ID NO: 84104 - DNA, 250 bp, Glycine max
  Clone ID: 700955626H1
gcgatttctccgatcaaagttcctcactttctctcccttgatcgacacccaccacgcgttagagagagaaaaaaaaccccgagagatcggaaagatgggtacgcttcagtcttggagaagagcctacggtgccatcaaggataccaccaaagtgggtcttgcccatgtcaatagcgattacgcggatttggacgttgccatagtcaaagccacgaaccacgtcgagtgtccccccaaagagaggcacctc

SEQ ID NO: 84105 - DNA, 248 bp, Glycine max
  Clone ID: 700955628H1
ccgacagaatttgaaaacaaaggctgaaatttgaagaaactgagatcattgggtgtgaaatatatggcagaggttgtcttgctagtcgatgatttgaaactactttctgcgattcctcgctgtagaatttgtcatgaagaagagtttgaaagcgtagaaaccttggaagcaccttgtgcttgttctggaaccgttaagtttgctcatagagattgcatacagagatggtgcaacgaaaaaggaaatac

SEQ ID NO: 84106 - DNA, 250 bp, Glycine max
  Clone ID: 700955629H1
atttgctttgtgctcactcatctatctattataaccaaacactcttcttcatattcttcttcttcttcttgttcttgttctatctgtgacgagcatcatggcctcgagagcagtgctattgttggctatgtgtgtgcttccggccatggttgtggccattcgcccagcaaagaaccctttttgcgtgaagggtcgcgtctactgtgacccttgccgtgctggttttgagacctcagcaaccacctacatt

SEQ ID NO: 84107 - DNA, 249 bp, Glycine max
  Clone ID: 700955630H1
ggaattgtagttaatattccaactagattgacaggagatggacacagtgttggggagagtggtaccgggctgagggacgagtacaaaagcaggggtttcaatccggttcgagtcactcctttgtggaatttccggggtcactctggaattgctcttgtggaattcaacaaagactggtcaggcttggataatgcgttggcatttgaaagggaatatgaattagatcatcatgggaaaaaggactggttt

SEQ ID NO: 84108 - DNA, 253 bp, Glycine max
  Clone ID: 700955632H1
gatgaaatcaactccaatggaaatgcaacgaaaatcaagagtcttgatgagcttgatcctaagatacagaacattgtattgctaagtgacgcttatggggctgaaggtgaactgggtgtggttttatctgacaagttcattgaacatgatgcttactgtatgtttgatgctttaatgaatggggcacgtggttcaattgcaatggctgatttcttctcttattctcctttgcctgggtcccatactggcttgc

SEQ ID NO: 84109 - DNA, 257 bp, Glycine max
  Clone ID: 700955633H1
gttgaatattgttgtctggtatatataagattaattcatgtcatgttttgtaggtacttgcagtctcctcctctagttgcatggtctaaatgcacattacttattggcgctgttcagtgttctttgtaaaatttgtgagttatttggaatttcattgttgaacgtagcgcaaatctgaatgatctgatcttgagcttgagcttagagtaagtactagtgtgtagttgaattgtataaggtacatttggagtttgcat

SEQ ID NO: 84110 - DNA, 251 bp, Glycine max
  Clone ID: 700955635H1
ctcgagccgttctagagccgtgctggctgttaaggatggaaaccgcgttgttgctgaggacatgtcctctgatcagacaccatttaggagagatgagtatgagagagtgaagctttgtggggcgagggtgttaagtgttgatcaggtggaagggcacaaggatccagatattcagacatggggtgatgaagagaatcagggtgatgatcctcctaggttgtgggttcagaatggaaagcttcctggagctg

SEQ ID NO: 84111 - DNA, 252 bp, Glycine max
  Clone ID: 700955637H1
gtttacatttcagcgcgcatcactttctctctccgaaatgaagcagtctcttctgctgagaggcgaaagcagtgaccagagttaccagtcgcggggaatattccggcgctccgatgctatcgcctacggctccaactacgagaaagccgctgcgttcatcgatctggctgaagatggtgttggtctccctgaggaaattctcgactcaccaaacttccaaaattacataagattttattttatattcactaa

SEQ ID NO: 84112 - DNA, 249 bp, Glycine max
  Clone ID: 700955640H1
cggagttaatgttccgagaggcgtggctgtttcctctgttgaagaggtcagaaaggccatcaaggaccttttccctaatgaaaatgagttggtggttaagagtcaaattttagccggtggaagaggtttgggaactttcaaaagcggccttaagggaggagtgcacattgttaagactgaccaggttgaagacatagctgggaagatgcttgggcagatactagttaccaaacagactggtcctcaggg

SEQ ID NO: 84113 - DNA, 250 bp, Glycine max
  Clone ID: 700955641H1
gaagatgctgataaaagtgaagacgaagaaaaaaagcccaagacaaagacggtgaaggaaacaacttatgaatgggaacttttaaatgatgtgaaagctatatggctgaggaatccaaaggaggttacagaagaagaatacaccaaattctaccactctcttgccaaggatttcagtgatgagaaacctttagcatggagtcatttcactgctgagggcgatgtcgagttcaaggcagtcctgtttgtac

SEQ ID NO: 84114 - DNA, 250 bp, Glycine max
  Clone ID: 700955643H1
cgaaaagaaaaggggaaaagaaaaatgaaaaatagcacaaggccaaaaatatcacctgatctgaaacttggacacgaaagaaaggctcgtatgcgcgacttctctctcttgcattgattcaacgttgtccattctccgaaacatcacaaagaaacccaactgagagagtgaagaataagaagaataaaaagaagaagaagggacgacaacaatggggggtttcgcaatgggttctgccttcgattccaaa

SEQ ID NO: 84115 - DNA, 251 bp, Glycine max
  Clone ID: 700955648H1
tattattcaagccacgatgactgagcttgccaaactctttcctgatgaaatttctgcagaccaaagcaaagctaagattctcaagtaccatgttgttaaaacaccaaggtcggtttacaaaactgttccaaattgtgaaccttgtcgacccattcaaagatctcctatagaaggtttctatttagctggagattacacaaaacaaaaatatttagcttcaatggaaggcgctgttctttctgggaagcttt

SEQ ID NO: 84116 - DNA, 258 bp, Glycine max
  Clone ID: 700955649H1
caaagttttcttctttcaaaacatttctcaaaccatccaacttcaattcaacaaccaccccttgcaaatttggctcaaagggggttcttttctctttctctgtcaccgctttccttcgtcgtaagtcaccgcgtgcgcttcgcatcacccgcttctctctgcaaatgtacatgtactgctttggcacccttttgtttggtttttcaggaaaaggctttagtgtgcaattcagcttgagcatgcggagtcataactgtt

SEQ ID NO: 84117 - DNA, 253 bp, Glycine max
  Clone ID: 700955651H1
gtgggcaaaaattgaagatagggatcagtgacagagagagataacaaacgaggtgaaatccctcacgttgaattgttctttcactccacttccctttttttgtgaatcccttcgaaattttcctttttttttttttgtataattgacgtgggttttggtcctgttgctatgctacggttctgattttcgattttcttgaaaaaaatgaattttagggattttactgagtaatggtaattgtagtctctacatg

SEQ ID NO: 84118 - DNA, 253 bp, Glycine max
  Clone ID: 700955652H1
aagattctgaacataagagttcatagaagagcatctcattggcaggtatggttgaatttattgggttgatcaaggtcaatgtggttaaaggcactaaccttgctatccgtgatgtaatgagtagtgacccttatgtcatcatatctcttggtcaccaatcagtgaagacacgtgtcgtaaagagtagtttaaatccaaattggaatgatagcttaatgttgtcaattcctgcatcacattccacctcttaaag

SEQ ID NO: 84119 - DNA, 251 bp, Glycine max
  Clone ID: 700955653H1
gctagaaaaagtacgttgagcaaatttggaagtagtactgctcagattgttgaaggggtcgacttcaatgtccaattatgaattctgatgtgattcatggatgcaatttaatttaaagttgtgctgttttaggattttatatattttgtggttctacgcttgattgattttgaacctactaatgtctgttccatatgtatggtcaatgattgtagttcatgacaagtgaaaggaattattgtgagttttaa

SEQ ID NO: 84120 - DNA, 251 bp, Glycine max
  Clone ID: 700955656H1
aaaaaaccttcatatacttgaaataatattttatccttgtgtcttatattggacttacattgccatttgacatatctgcctgaaatttgcccattgtgaagcactttaattttatccatttttaaatcgtagttgtttcaactaacaagttatgttgttcaaggtttctgttatattctgttgtttctgacgtgtgtaatgggttgtacatttcttatgtgttttgcttttctgtattcttattcttgtgt

SEQ ID NO: 84121 - DNA, 250 bp, Glycine max
  unsure (1)..(250): unsure at all n locations
  Clone ID: 700955657H1
ctagggtaagagctttggcgagggaaaaaaaaagacgagaaattcacaagactacataccgaaaaaccctatttattgattcagagagggcagagcggacgccgatagagaggagctgccaacagagagcattgaggttccgcacaccacagcgaggaantgaccttcactgcttcaattttacaccctctctctgtttggtgatagattttgaatcaaattatgatattgctgcctctgccaacttcat

SEQ ID NO: 84122 - DNA, 250 bp, Glycine max
  Clone ID: 700955658H1
atggggtcagaggtgtctaaacagatggagcgaagaaagacaatccagacagagaagaagagtctgtccgatctgaaaagcagcggagaagactaccctggctccgactaccgtccccaagacagaaaaaactggatgtcccatctcgaccctcagaaactccgcatcaaccaaatcgtctggcccggcacccacgactccgcaaccaacaaaattggcatccctctcctcactcgccccttcgcccagt

SEQ ID NO: 84123 - DNA, 249 bp, Glycine max
  Clone ID: 700955659H1
caacaacttctccttcaccggtggcttccccaacaacatcacgaccttccctttcttcttcgagcttgacctaagtaacaacaaagtcagtggccagttccccacgcaagcgattcagaacaaccagttagtcttcctggacctcaggttcaaccagcttaccgggccgatagacccgaaactcttccagagggacctcgatgtgatctttgtcaacgataaccagttcaccgggtgcctcccggagaa

SEQ ID NO: 84124 - DNA, 246 bp, Glycine max
  Clone ID: 700955660H1
ctggttttgttttaggagaagactgaaagaagaagaagaagaaaattgagggaggatgtggctcgagattatcttcggtttggtcatttacagattgttccggcgcttcttctacgacgacgacgttttggacatcgaaggatcggattcttctgctcttttctccgtcgcggataggcttaaaaaactttacggagcaaatgtgtatgtgggtcttcggattcccgatgccgatactgcttctcg

SEQ ID NO: 84125 - DNA, 249 bp, Glycine max
  Clone ID: 700955661H1
caactactactactataggtacttactactttgcctagctcctctttctctctcttcccttttgcactgaacttcactctctcttctatatcaagggttgatcacataacctcaatatatttctaataataattgatatagtttgagttattgtttcgagacacacagatagagagagagagagagaatgggtagagggagagttgagttgaagatgatagagcacaagatcaaccgccaagtaacttt

SEQ ID NO: 84126 - DNA, 240 bp, Glycine max
  Clone ID: 700955663H1
gtgcatattcctgcgaactgcaaccacaacatactctacggaaacaatatacgtcgcgtcaagttctgggacccttacttcttcttcatgagacctaagcctgtgtacgaagttaccttccttgatccttatgccggatcagatatctgttaaggctgcgaggtactcgtccatttaagtcgccaaccacgtcgcatcaagtacttgatgatctgtaagggtataagtacacctggctca

SEQ ID NO: 84127 - DNA, 252 bp, Glycine max
  Clone ID: 700955664H1
atcaaagctgagaagtgtaatgtacaaagggttcacctctgagctatttgtgccatacatggatcccacacaagattggtactttaagacatacatggatgctggtgagtatggatttgggttgcaggcaatgccactagaccccttgaatgattgccccaagaatgcttactacatggatggtgtctttgcctcttccgatggaacaccatatctccaacccaacatgatttgcatttttgagagttatgc

SEQ ID NO: 84128 - DNA, 253 bp, Glycine max
  Clone ID: 700955665H1
agataataaactcaaacaaggtaagctatgtagttgccctccattcttccaccacctattttgaaacattctctctctctcctccaccacattttagggagcacccgcgcttctttctgcgacccacatcgctgttgtttatttgttcatttttggggttgtttatttgctggttccgtttttgttctttttcgtggttttacccttaaaaatcgcgcctttaccaaaaatttgacggataatttgtgggggc

SEQ ID NO: 84129 - DNA, 255 bp, Glycine max
  Clone ID: 700955666H1
aacttaccttatctcacccttctttgactgttctcccacaccacacccatgacactcctcctgctccttattctcctctttcacgcggcggaagccaagggacagtggcagctcctccacaaaaacatcggcattgtcgccatgcacatgcagcttctccacaacgaccgcgtcatcatcttcgaccgcaccgacttcggactctccaacctaaccctccccgacggaagatgccgcaacaacccaaacgagttg

SEQ ID NO: 84130 - DNA, 249 bp, Glycine max
  Clone ID: 700955667H1
ccatatccccccctagctacagagcagccaaaggggaggaataataataagcctatattctaaggccggaaaaataaaaaaggaataacaaaaatgtctggaaaggtaattatctcggctgtttctctcatcctggtggttggagtggccataggtgtggtggtggccgtcaacaagaagggcgaggatcccacacttcaatctcaacaaaaatcagtaggggttatctgccaaaacactgatgaccag

SEQ ID NO: 84131 - DNA, 247 bp, Glycine max
  Clone ID: 700955672H1
ccagacttcgaggttgttgataaaggggttgaggttcaagagacgaaagaattatatgacggagaagaatctgagaaatccatagaagtgaagtcagctacaagtgaggtcgtcaaggaaataatgcatgatcagttgcgcctgactagattaacagagcttgattcaattgccaagcagataaaggctctagagtccatcatggtagaagataacaagttcacaaaaggtgaggaagctgagtcac

SEQ ID NO: 84132 - DNA, 247 bp, Glycine max
  Clone ID: 700955673H1
attacactcacactctttgtgaaaaaggggagtttcttattctttctagacgcttccattgatcggcgatttcttagacatggcggacatcacgaacacgaggaagtgaagggtgagtccttgttggagaagatttctgggaagatccacgaccacgattcgtcatcttcgtcggattccgacaacgagaaaaccagcgcttctgactccttgaagtcaaaggttttcaggcttttcggcagagaaa

SEQ ID NO: 84133 - DNA, 244 bp, Glycine max
  Clone ID: 700955675H1
gcaaaaggagcaccgcaccgcacagcggatgcagagaaaaacctaaagtggcggaagatgacggaggtggcgagatcagtggtgcacgacgttttggggcaaagggtggtcgacgtggaccagccaatcgtcgattacatcgtaaacgtcctcgccgacgatgacttcgatttcggcctcgacggccaaggcgccttcgaagccctcggcgagctcctcgtcgccgccggctgcgtcgacgatt

SEQ ID NO: 84134 - DNA, 244 bp, Glycine max
  Clone ID: 700955677H1
ctctttcctatcacactttctagatagctagcctgtaagatatatatatagatatttcatatatatcctatggtccgtgagtgcccttgttctgtaccaaccctttcttccacatgttgagtttcagcatcgtcctctcttgagtccccatatcaaatacccaccgaattcaaccccccatataacaaatctcctcccatcccatttttcagcaccaaagtttgaaacttttctcaattgggtt

SEQ ID NO: 84135 - DNA, 246 bp, Glycine max
  Clone ID: 700955678H1
cgtcgtacggcgtcccggcgaaaaggcggtggaaagggctcgtagttgcggtgctcggtctcgtcattctctccatgctcgtccctctcgtcttcctgctcggtctccacaacggtttccactcttccggatatatatatgaacagaagagtactccttcgaatgagaaaagtcttgaaagatatgatagacatgatgttggccataatgagtctgaggaaggacaatcaaatcatgtggaggatc

SEQ ID NO: 84136 - DNA, 248 bp, Glycine max
  Clone ID: 700955679H1
caatttttctctcaaccggcccaatttagcataagcccagcatggccaccgcaacagcagcagccacctcgtccttcatggggacgcgcctcctggaggcccactacggggcggggcgggtgcaggcccggttcgggtttggcaagaagaaagccgccgccccgaagaaagtttccagggggtcgggcttcagctccgataggcccctgtggtatccgggcgccaaggcgcccgagtacctggatggg

SEQ ID NO: 84137 - DNA, 248 bp, Glycine max
  Clone ID: 700955680H1
tcctgccagtagtcatatgcttgtctcaaagattaagccatgcatgtgtaagtatgaactaattcagactgtgaaactgcgaatggctcattaaatcagttatagtttgtttgatggtatctactactcggataaccgtagtaattctagagctaatacgtgtaacaaaccccgacttctggaagggatgcatttattagataaaaggtcaacacaggctctgcctgttgctttgatgattcatgata

SEQ ID NO: 84138 - DNA, 255 bp, Glycine max
  Clone ID: 700955681H1
aaaagttattaagagcttttgcttttctttctgcgcgcttttcccaattaagtagttcttccttttctcaaagcaaaaaaaatgttcatcgagagtttcaaggttgagagtcctaacgtgaagtacacagagactgagattcagtccgtgtacaactatgaaaccactgaacttgttcacgagaacaataatggcacttatcagtgggttgtcaagcccaaaactgtcaaatatgaatttaaaaccaacacccat

SEQ ID NO: 84139 - DNA, 253 bp, Glycine max
  Clone ID: 700955682H1
gacggaataaaagatgaccctttcggaaatcagtgggtggctgtatttgagtacatagtgcggggcatggcaggacttcaagggcctttctattgcggaacaaacaccttccatagaagaaaagctatttatggtgtttatcctgatgaaactggaagcaggagaaatggaaaattagaagaaaagatattgatacaacaatttggaagtttagaggagtttgtcaaatcagcagctcatgctatggaaggga

SEQ ID NO: 84140 - DNA, 251 bp, Glycine max
  Clone ID: 700955683H1
tggtcaagttgcatcagatcgtttggggccaggaaagatggaacttggtcttggaattcatggagaacctggggcagctgtggctgatattcagcccgtaaatgtggtggtttctcatgttctacagcaaatattgtccacggaaacaaactatgtaccgataactcgaggagaaagagtggtccttatggtcaatgggttaggtgccactcctacaatggaactaatgattatagctggaaaaacagttc

SEQ ID NO: 84141 - DNA, 251 bp, Glycine max
  Clone ID: 700955684H1
cgccgtcgcacacattcggcgactcctcgacatcgtggcctgcaccacctccttcgcctccgcctccgccgccgcagcagcaaaaccccccgccggaaagtccaaagaccccaacgaacccggttcagaaaatggacccgaaacaaacccgaaacccaaacccgtggatccgaattcggacctggtcaatgccaaaagcgacaaagctgacgctgacatctctatgtgtccacctcccaggcttggacagt

SEQ ID NO: 84142 - DNA, 241 bp, Glycine max
  Clone ID: 700955685H1
tttcccctagattcagccacagtttcggaggagaagaaaatagtcgttcgagatggcccgtacgaagcaaactgctcgtaagtccacaggaggaaaggctcctaggaagcagcttgcaaccaaggctgcacgtaagtctgcaccaactactggtggtgtgaagaagccacatcgttaccgtcctggtaccgttgctcttcgtgagattaggaaataccagaagagtaccgagcttttgatc

SEQ ID NO: 84143 - DNA, 250 bp, Glycine max
  Clone ID: 700955686H1
ctcgagccgatcttgcacacacgggtacttcctccaaaccaacattatgaaccctactcttttcactaaaccctcttcttcacttctccctctttcaattcccagttagttccaaccgcttccttcgcaaaggttttcgaataatggttagtggagctctcaaaacgactgagaacagtcttcacaagcaagcttctcaggtttccgatgccaatgatgcagttgctgaccctgatattcctgcaaagag

SEQ ID NO: 84144 - DNA, 247 bp, Glycine max
  Clone ID: 700955687H1
gttccatcaatgattattgatgaatcaccacaaaaaacagaacgaggagagattaaaccacaaaatcctcctctgcaagatcagataccggatccagaacactcggaagctcaacattcagctcctaagtcaccagctgtttcttcatccaaatctgaggataggggagatgccaatttagatacttcaccaaaggctactaatcatgagatgaaccaagcaatttctgagaaccccgattccaaca

SEQ ID NO: 84145 - DNA, 250 bp, Glycine max
  Clone ID: 700955688H1
atggccacctctgctattcagcaatcagcattcgcaggtcaaactgctctgaagcagctcaatgagttggtccgcaagaccggtggcgccggcaaaggtcgcaccaacatgcgccgtaccgtcaagagtgctcctcagagcatttggtatggccctgatcgtcccaagtacctgggtctattctcagagcagattccgtcatacctgaccggagaattccccggtgactacggatgggacactgctggac

SEQ ID NO: 84146 - DNA, 245 bp, Glycine max
  Clone ID: 700955691H1
gcccttgcacagagaaaagaagacagaagagcaaggttacaggctcagttttcacagatgaggcctgttgcaataacgccttctgttgcgccccgtatgcctctctaccctcctggtgctcctggtcttggacaacaatttttgtatgggcaaggacccccagccatgatgcctccacaagctggatttggataccagcagcaactagttcctggaatgagacctggtggtggtcccatgccaag

SEQ ID NO: 84147 - DNA, 245 bp, Glycine max
  Clone ID: 700955692H1
gttgcatgcaagcaaacagaaggtcactgctattgaaagcatgcttaggggtttggatttgtttgataagcatggttcatctgctctccggtcatcgagcttggatctagtgcaggagttgaccctccctcatctcgtgatccaccattccctgctgctgtcacagcatctaatcatctaactagctctttaacgacagaatcaactgcatctggtgccaataaagctagtaaccgatatggtgg

SEQ ID NO: 84148 - DNA, 246 bp, Glycine max
  Clone ID: 700955693H1
agggtatgtagctccagaagtatggaatagaaattttggcggaatttcgcagaaatctgatgtttacagctatggaatgatgctactagaaatggtgggagtgaagaagaatattaatggaaaagccagtcagacaagtgagtacttcccagattggatatacaacaggctagagcagggcatagatttgacaactgatggggtgatagccacacaagagaaagagatagcaaggagaatgactat

SEQ ID NO: 84149 - DNA, 246 bp, Glycine max
  Clone ID: 700955694H1
gccaccaaggctgagactccagtggctgcaaaagcttaggaattgaattgaacctgccataataatatatatacatatcgaccgagcgacgcagtcaaattgcattagttctcatcaaaatcatcattttctttcttctttcatgttttccacaatttcactgtgtttcatgtgattttgtctattgttattaggctgttctgcatcataattaatgataaaaacacatatgtatgtatgtatgta

SEQ ID NO: 84150 - DNA, 245 bp, Glycine max
  Clone ID: 700955695H1
tcaaggtgtagattgtctaaaactttctttatgtgaaagaatctttggatttaggatttttactctgtggactatagttggaatctgagtttgatgagatctatagtggagactggagaaggaaggaacttgacatgatttccacctgatgtcttcattctggaactgagcaaatgggctgttgtgtttcaacaagcagtcagagtacttgtagcagcgggagcaatggagacacgatcgctcca

SEQ ID NO: 84151 - DNA, 254 bp, Glycine max
  Clone ID: 700955701H1
agaaccggaagaggaaaaactagaaaagatcccaacagtgagaagccgagcgattttgtttaccttccaagagatgaagcatctgatgacttcaagtgaccaaatgcttcatctcttggagtcatcagattttctcgcttttggaatcaaatctgtatcccaagatgtcttgcctgtcttgactgatgcattcgatggaaatattttgagccttgagtttgataattttgctgaagtgcgcaaactctatgaag

SEQ ID NO: 84152 - DNA, 246 bp, Glycine max
  Clone ID: 700955702H1
acctagcaggacctaaggatggcatagccttaaagttaagggcgaggttcaaacgaagaaaggcttatggtggatacctaggcacccagagacgaggaagggcgtagtaagcgacgaaatgcttcggggagttgaaaataagcgtagatccggggattcccgatataggtcaacctttcgaactgctgctgaatccacgggcaggcaagagacaacctggtgaactgaaacatcttagtagccaga

SEQ ID NO: 84153 - DNA, 256 bp, Glycine max
  Clone ID: 700955703H1
cggctcgagagacagcacaattagagagaacacgcggcaaaggagtgccatatgatggtcaatcgtctaggagaagctcaaaggatcaccaagaatttaaggatgtatttgaggtctcagagattccaaaggtagagagccataggtatccatcacaggggtgtgcagacttgatgaccactgatgccggtatctcattcattgaacagaagttcatggatgccaaacgacttgcaactcatcaagacttacagtc

SEQ ID NO: 84154 - DNA, 244 bp, Glycine max
  Clone ID: 700955704H1
gagaatccgaggcgaagagaagagaaaaattaagatggaggggaaggagcaggatgtgtcgctgggagcgaacaagttcccggagagacagccgattgggacggcggcgcagagccaagacgacggcaaggactaccaggagccggcgccggcgccactggttgacccgacggagtttacgtcatggtccttttacagagcagggatagcagagtttgtggccacttttctgtttctatacatc

SEQ ID NO: 84155 - DNA, 245 bp, Glycine max
  Clone ID: 700955705H1
ctctctctctctctcttcgttcttttggagtgtgtgtgcacccattgatgacaagcaaccccattgcatggaagcctaagaggaggagaagacgaagaggacaagggtaactgaatcgccgcttctgcagcttcgttctttcgtttttgtttcatctttttagcttcagagggtaaataaaaaatggaggttttggtgggtcccgctttcaccatcgacgttccctcgtctccgccgcagcatgc

SEQ ID NO: 84156 - DNA, 242 bp, Glycine max
  Clone ID: 700955708H1
cgtccatcaaatgagacccttgcttctatctatgttgaagccattgaggtgggttaccgtcattttgacactgctgcagtgtatggaacagaggaagccataggcctagccgtggccaaagccatagacaaaggccttataaagagtagagatgaagttttcatcacttcaaagccttggaacacagatgcacaccgtgaccttattgtcccagctcttaagaccacattaaagtacatata

SEQ ID NO: 84157 - DNA, 242 bp, Glycine max
  Clone ID: 700955709H1
atagagttgcttttccaggatgggaggttcaggtggggtagacttgaaaacctgctagcccaggggagaatggacagggatttctctgcaaaagaggctttgcaacctgtcctgaaggtattattgagtccagatggtgaagaaatcagaaccctagttattaaggaagctgttcgtgtaactgaagcttttactcttagcacaatttctgatacatacaagtcagttcccgattttatgag

SEQ ID NO: 84158 - DNA, 239 bp, Glycine max
  Clone ID: 700955711H1
gcagagcagagatctagcgtattctctcgctctttctttcactgtcacagagccacatccatgggcttcccagccaacggcgcctctgcggcccagcccctaaacttcctcatctacggccgcacgggctggattggcggcctcctcggctccctctgccgggcccagggcatctccttccattacggctcgggccgcctcgagaaccgggcctccctcgaaaccgacatagccctcct

SEQ ID NO: 84159 - DNA, 239 bp, Glycine max
  Clone ID: 700955712H1
aaaaaagaaagcaaagggtaggcattgacccctttgcacaaaggaaaagaggggtggtgttgtgttaaaaaaatattgaacttggttggttctaagtagaaacaaaacttgtcattttcccatttctgcatttttggtttgggagaggagaaaccaagaattaagaaatgggttgctccgtaagagtttgttgtgtcttatttttggtgttgttggtggcatgtgttagaggggaggac

SEQ ID NO: 84160 - DNA, 240 bp, Glycine max
  Clone ID: 700955713H1
gaagaagaaagatccgtaaattaacattctctccctcccttcgctataatagcaagcttttcaagcatatttctggggtttggtcccttttccttgtttggggttttcttgggaaaaaagaagtaattaggtataataatagtataactaaagcaaaaaaaaagacagtaatatgggaaggggtagggttcagctgaagaggatagagaacaagatcaatcggcaggtaactttctccaa

SEQ ID NO: 84161 - DNA, 175 bp, Glycine max
  Clone ID: 700955715H1
ctcgagccgttgaattatgcgaccatgcatttccttggttggactttatttgatctgtttgttttagtatataagtgtttgatccatttagtctcggaataataaatgtgtcgtaagactaacattggagacaatcatgtatccaaatccttcatatatgagagaatattttgat

SEQ ID NO: 84162 - DNA, 252 bp, Glycine max
  Clone ID: 700955717H1
gtggttgaaagttaagaagtagcaaagatgtttccattcacgcacaagggtcaaaagataaaggggactatggtggttatgcagaagaatgtgttggatatcaacagcatcaccagtgttgacgggatcgtcggcaccggcttagacttcttaggcagtgcactcgatacagttacttttttagcctcctccatctccatccaacttattagtgctaccaaggctgatggtgggaaaggaaaagttggaaag

SEQ ID NO: 84163 - DNA, 247 bp, Glycine max
  Clone ID: 700955719H1
attaattctcgtttcccattcccatccccatgccaactattttgcataggattttccttctttacaacctcgtacactcattcctcctctgtctggtccccaagaaggtgcgtcccttcctccccccttcttggttccaaaccaaaaccatcactgcaccttcttcttcttcttcttcttcttccagtgcccgcatcatcaagagaacaacaatggaccccaacgagctgaagcgcgtgttccagat

SEQ ID NO: 84164 - DNA, 247 bp, Glycine max
  Clone ID: 700955720H1
caacacagagagaagcgtcttaataaacgctcttctctgaaaaacctgatttcttctcttcttctcttctctttcgtttcgatcttcgatctctgaaaatgagagagtgcatttcaatccacatcggtcaggccggtattcaggtcggaaacgcctgctgggagctctactgcctcgaacacggcattcagcctgatgggcagatgccaagtgataagactgttggtggaggtgatgatgctttcaa

SEQ ID NO: 84165 - DNA, 242 bp, Glycine max
  Clone ID: 700955721H1
taaggattaaggaggcataaaggaccaattgctttggaatattcactcatgacaaggcacaaggtcatgcgtgtatgccaacacatagtaatgatgtgtgtttttattcagtaggcaactggcagatcgggttttcccttgtcacttttgtataattattttggaagaatttatgatgtcaaagttattgtttaatattaatggcgacattgtatttattatttgtaaaatattcggactca

SEQ ID NO: 84166 - DNA, 243 bp, Glycine max
  Clone ID: 700955723H1
cacacaaacaccctttgagttcattaacctcttcagaaaaaacaacaacaacaacaaaaaaaaacatcatcatcaaaaaaacttccgagagtttaatggcaacacgcgtgatccctccaagaatcctcaagaagctccgttacaacacaacaaccaagccactcaacgctgcccacccctcaatctctccagtcatcgccccaccgtcactcttcgagaggtcgccgtcccctgtcgcggatg

SEQ ID NO: 84167 - DNA, 241 bp, Glycine max
  Clone ID: 700955725H1
ggggttcatagatttagggaatcgattactatactagtaataaattgtacaaaaaataaaaatataaataatataaatataaaaagaacaaacacaaattttatgtgattagtcgcggtatttaaaataaaaaatgaaagtagacaaataaaaaaggaaaggagatgtttgaataaaaataattccccttcaagttcttattttttgagaggacaggacaatatgaatgttttattatgct

SEQ ID NO: 84168 - DNA, 240 bp, Glycine max
  Clone ID: 700955726H1
cttttaagaacctagactagactagactacatcatcacctaatacccagaccatctcgccgcacacagcgcactgcagcgttgtgtcttcgcacgccgccgtcgacgtcgtccgccatcgtcacatctcgccggagcgtcgcgtcgctggctaagtgccaagtgctgctgctgattttgtggcttgttgataaaaatgagacttcataacacataacatgctgtcatcgaacataaaggg

SEQ ID NO: 84169 - DNA, 239 bp, Glycine max
  Clone ID: 700955727H1
gaagaaacataagagggagttataagatattcacagaagcagcaaaaatgcttatgcaacaagttcatgtatcaaatccaagttcatcttgtctcatccttcaaaagccatgcctccgtgacattactcacccttcttttcagctttggtcaaggccatcatcgttcccaaaccaaaggaagcaaaaaagggtttcttatggatgcaggagtaatggcaacaaaatcaaagctgtggct

SEQ ID NO: 84170 - DNA, 239 bp, Glycine max
  Clone ID: 700955728H1
attgcctttaccatctcagtctcaactctctccaacaaccacaatggctctcttgggcgccgcctcctcctccgctcgcatcattccctccgtctcactctcttcctcttctcgctccttcttctcactctcatcctcttcttccaaactccaatgcttgcgctcctctcctcgtatttcgcacctctttctcaatcagcgaagagcggaggttcgcgtttcgagtggaggatacggaa

SEQ ID NO: 84171 - DNA, 236 bp, Glycine max
  Clone ID: 700955729H1
gaaattctcgtcctcttcctacataagtcttctcttatcataaacgcgtgttgctcggataaggttgtgctgcggtgattcactcgtactttgcttaatatggcggttgagaagttgagcattgcaaaagatgtgactgaattaattggcaaaactccattggtatatctcaaccgcatcgtggatggctgtgttgccaaagttgctgcgaactagaaatgatggaaccttgctcc

SEQ ID NO: 84172 - DNA, 235 bp, Glycine max
  Clone ID: 700955730H1
caaaacggcagcaatgaaaaagatgtcttctgctactagatcgctcaaaattgatgaaatggaagaactagatgaagaagactctgatgtgacagcagaagattatgatgcatcggattagttcagttaaatatttgcttaacatgatacatctaatgatctttacgttgctagcatcatgttgttgtattgtttgattacttagattgcaggttctgtacagaaagagcgcatc

SEQ ID NO: 84173 - DNA, 250 bp, Glycine max
  Clone ID: 700955732H1
ttcggctcgaggtgatttggagtttggagcgactgaactaatcattaatttgcactcgctgtttcagcttcatcacccttcttttgcatcatttatatctcttgagaaatggcacaagaaacctttctattcacatctgaatctgtaaacgagggtcaccccgacaagctgtgcgaccagatctctgatgcagtacttgatgcgtgccttgaacaggaccctgacagcaaggttgcctgtgagacatgca

SEQ ID NO: 84174 - DNA, 254 bp, Glycine max
  Clone ID: 700955733H1
gagagagagagagagagagagagtcctgaaacttgggtgcgattccttcactcacaacaacaacacatcactatggctcttctgagtcgagcctcttcacgcttccctcagctggtttcccctcaaagggtagtttcactccacacaacgctcccatctctgaacgcatccccatccacagccacgcctacaccatatgccccgccaccgcctccgtccgcttcctctcccgccggcgtttcgaaggcggcgga

SEQ ID NO: 84175 - DNA, 248 bp, Glycine max
  Clone ID: 700955734H1
gccaagtgaaagagagaagaaaagtcaaagacaatgtcagggatcattcacaagattgaggagacccttcatgtgggaggccacaagaaggaggaggagcacaagggtgagcagcaccatggtggagaatacaaaggggagcatcatggtgaacacagtactgaatacaaaggagagcatcatgttggtgagcacaagccggagcaccatggcggagaagagcacaaagaggggttcctagacaagat

SEQ ID NO: 84176 - DNA, 245 bp, Glycine max
  Clone ID: 700955735H1
aaagggtaaaatgcaggtcggtgcccattattttgaggaaggaaatgtgcagttagatgcaaaacatgaatgcaaagatgcaactctttttcaggcccctgaagattgtgcacttgccataacaagcattattcgtcaccatgaaacagagtaccttgcttctcttgaggcatcatatctaaaccttcctgattctactttcaaggatcttcggagaaagcttcctgtcacccgcacgttatttc

SEQ ID NO: 84177 - DNA, 245 bp, Glycine max
  Clone ID: 700955736H1
ctttctcatttcaaactccttcaagcaataatgaattctcgaatcaaagttcttctctgaagcagcagattctggagctagctaatagtcccagaacggtgaaatggatgaagagaataaggagggaaatccatgagcacccagaacttgcatatgaagagttcagaacaagtgctatcataaggcgtgagcttgacctgttgggtgttggttacaagtggcctgtggctgggactggtgtggtg

SEQ ID NO: 84178 - DNA, 243 bp, Glycine max
  Clone ID: 700955737H1
tctctctctgtgtgactaacataaaataattagagagagagagagagagagaggatatgggttcgaagaggtatgcgctattgatgtgcggtgaggattcggagtacttggtgaagatgcacggaggcacctatggggtattcatgaagttgctccaagagcaagaggaaaagtgggacctctacaagctcgtccaaggagagttcccggagcagcatgacttgcctctctacgatggctttg

SEQ ID NO: 84179 - DNA, 242 bp, Glycine max
  Clone ID: 700955739H1
ctccggtttatcattctttttcaatcaggtcaagtttgaacctgttaaaatttcgcttaaggattgtttggcatgcagtggatgcgtcacatcagcagagacagttatgctggagaagcaaagtttggatgagtttctgaacaatattaattcaggaaaggccgtgattgtgtctctttctccccagtcaagggcttctattgcttttcattttggcatttctccaattcaggctttcaaaa

SEQ ID NO: 84180 - DNA, 237 bp, Glycine max
  Clone ID: 700955743H1
cagaaaccgtctttttcttcttcctcctggttgcggcacaacaatggagcctggtcggtgacaagagttgcagcggaagagtcggtttccttcacagtgtattctgtgttgcttccttccttcctttgtgtatcagttgacgccaccatgccgtcagtgcaacggggaagcttctccaatcgccaaacccaattctccgagcggaggcagaagattatacaacagaggaagtctctt

SEQ ID NO: 84181 - DNA, 236 bp, Glycine max
  Clone ID: 700955744H1
aatatgctatagtcaaagaacttgccgagtctgtcagtcttaaggatggaacagttgttcttcagtttgagactcgccttcagaatggcctcgaatgtggtggtgcatatattaaatatcttcgaccccaggagagcggatggaaaccaaaggaatttgacaacgaatctccatattctatcatgtttggtcctgataagtgtggtgctacaaacaaggttcacttcattttcaag

SEQ ID NO: 84182 - DNA, 238 bp, Glycine max
  Clone ID: 700955745H1
gagataaagaattgcaatataacttcaaggagtatagaacaatcacttgacaattccaattcacgtctcatgttaaattataaggatgatgattccagagttgcacgcaaatcttttgatgatgttgaattcttatgcaaagatttctgtccatcttctctggatgacattgccgacatgagttggccactatgtcaagaatcagctcccacttctcactcgatgagattcactagaa

SEQ ID NO: 84183 - DNA, 248 bp, Glycine max
  Clone ID: 700955749H1
tttcctttctataacctatctgaaggctcaatctctgccacagaatccttagcagtcatagcatcaattctcatattactttgcttctgtttcagatcttcaagtatctaccttcttgactatgtttgttatatgcctcctgataatctgcgccttccttactctcatattgtagaacactttgaattgtgcaattttgaccctgaactcataggctttgaattgaaagtattggaaagatccggtat

SEQ ID NO: 84184 - DNA, 245 bp, Glycine max
  Clone ID: 700955750H1
cttttggatatatacttttagtcaaaatcaatatagtttctcccaccattcctataaatatatattttatgaacatgcttgaatcatagacaatagaaattgccattgcactcaccaagtatgcagttggcttcatatttgaattttcagtctgtgcattttctaattttgccccatctactagtttcagaccatgtttacaaagcttcacgagaacatggtattataattttattttcaatcac

SEQ ID NO: 84185 - DNA, 244 bp, Glycine max
  Clone ID: 700955751H1
cttatcttagctaccccatcacaacaaccacgatactatttctcatactctattaggcaaaaacaccaccaaatgggagaggaaaaggagcagcctaagaatgacaccgagaaaaagcccgaggaggtagcccccaagaaagacgacggacccatccctgtcgtttacaaactcgacttgcattgcgagggatgcgtcaagaagatcaaacgcacctgtcgccacttcgaaggtgtggaaaccg

SEQ ID NO: 84186 - DNA, 241 bp, Glycine max
  Clone ID: 700955755H1
ccacatcaacagccatgaaaaccacactcttctcactctctcccttattcctgttcctactcttctccctagtcgaaggactcacccccaaatgtgacacccaagaccatggctcaacccttgaagttttccatgtgttcagcccctgttccccatttaggccaccaaagccactttcatgggcagagagtgtccttcagctgcaggccaaggaccaagccaggctgcagttccttgccag

SEQ ID NO: 84187 - DNA, 241 bp, Glycine max
  Clone ID: 700955757H1
cttcttcccaaccactactactcactcactgcagatctcaattgcatcgctgtccatggctaccatcgttagcatcaaggcccgctagcatcttcgacagtcgtggcaatccaactgtcgacgtggatctgacttgctccgatggtacttttgccagagctgctgttccaagtggtgcatccactcggatttatgacgcccttgaattcagagatggcggatctgcactaccttcgaaagg

SEQ ID NO: 84188 - DNA, 74 bp, Glycine max
  Clone ID: 700955759H1
caaagtacaaattatatccttgaaatgatagatttcaagagagtaagcatcattggacacgatacgatattaat

SEQ ID NO: 84189 - DNA, 234 bp, Glycine max
  Clone ID: 700955760H1
cactttacaaagatacccaagtggaacttacagcaggcagttacccagattaacagagctgcacgccaacatttggagttcaaatttaaatcaatgaaatatcttatgcggtagaggtggtgcggccagccaaagctagcatgattgcacatcatttagatacaattttgtagtgattagaagtgagaatagttaaaatttctaatatgtgctgtatttgtgttcattcttatt

SEQ ID NO: 84190 - DNA, 237 bp, Glycine max
  Clone ID: 700955761H1
attgaatctcagaattctctaaaagagatctttttctgctctttgaagaaagaagggtctttgcttgattttggagatgtctctgctctcagatctcatcaaccttaacctctccgataccaccgagaaggtgatcgcagagtacatatggatcggtggatcaggaatggacctgaggagcaaagcaaggactctcccaggaccagttagcgacccttcagagcttcccaagtggaa

SEQ ID NO: 84191 - DNA, 239 bp, Glycine max
  Clone ID: 700955763H1
tcccaactcgccctcgactcacatccttgtccgattccgcgaacgagtcgagtgaatcgggttggtaagatctattctgtttcttcgtcatggcaaccggacaactattctcgcgtactacacaggctttgttttacaactacaagcaacttcccatccagcggatgcttgattttgacttcctttgcggcagggaaacaccatcagttgctggaataattaaccctggttctgaggga

SEQ ID NO: 84192 - DNA, 256 bp, Glycine max
  Clone ID: 700955764H1
attctgctccacgtgatatagagcaaagttgtttgactgataccagtttattgattttgatatccgaacacacattctttcagcaaataagtacggatatatatatgtaaaaaaatgaacaaaaaagctttgtccattttgatgcgcgccagaatgaagcccaacgatcgtacaagcctttctctctctcctattcctctaacaaacgcgaacagtcaaatgcagcagcagaattcccgccaaaacggatcgccag

SEQ ID NO: 84193 - DNA, 247 bp, Glycine max
  Clone ID: 700955766H1
ttgtactcactactgtgttcaccatggtgagcacaagccagagcacaaagaggggttcctagacaaagtcaaggacaagatccatggtgagggcggcgccgccgagggcgagaagaagaagaaggagaagaagaagaaggagcatggccatgagcatggccatgacagcagcagcagcagtgacagtgattaaactgctgcatcacctatatatttaaaaggtttatgggaccatagtagcgagggc

SEQ ID NO: 84194 - DNA, 239 bp, Glycine max
  Clone ID: 700955767H1
gtcaagtacagagaagaagaattgaagaatgtaagaggggatggaactggtgagcgcaaggaatgggataggatctatgattatgatgtctacaatgacttgggcgatccagataagggtgaaaagtatgcacgccccgttcttggaggttctgccttaccttaccctcgcagaggaagaaccggaagaggaaaaactagaaaagatcccaacagtgagaagcccagtgattttgttta

SEQ ID NO: 84195 - DNA, 242 bp, Glycine max
  Clone ID: 700955768H1
atcgaaatggaaatagacgggaatagagtggtaatcctaggaggtggcgttgcgggatccgtcgtcgctaaatctcttcaattccatgcccatgtcacactcgttgatccgaaggaatattttgagattacatgggcgagtttgaggtcaatggttgagccatcttttgcagagaggtcagtgatcaatcacagagattactttaccaatggcgacatcgttacgtccaatgccgtcaatgt

SEQ ID NO: 84196 - DNA, 234 bp, Glycine max
  Clone ID: 700955769H1
ctggccgccgggaccatggccggcgctgttgatctgtctttcagctcttccgcgaatctcgagatattcaagctcgatttccagtccgacgatcaggcactgcctcttgtcgcggagtgcccgagctccgaccgtttcaaccgtctctcgtgggggaagaacggttccggctccgaagacttcgctctcggcctcgttgccggtggaatggttgatggcaacattgacatctgg

SEQ ID NO: 84197 - DNA, 242 bp, Glycine max
  Clone ID: 700955770H1
aacaatttcccatgatcctgcaaatccttctgctaaggaaacaaagctcaagcctcaacagaattctgaagacaacaatgttcgagtacggaaaagcacaccttctagatcagccaaggatcctgctaggattccaggtagagagagtccgaggagatcaaatatggaaaataatttatcaaaacttgcaactccaactacttggtcagctagcaaatccaccaaagaagtttctaaaagtg

SEQ ID NO: 84198 - DNA, 239 bp, Glycine max
  Clone ID: 700955771H1
tttgaaagtgagtgtggcgtaccgtgtacgtatctgcagaaagtgaatgaatggtaatgggggaagaagggtgcaaggtatgtgttacaggaggcagtggttacattggttcctggctcatcaagaagctactggccaagggctacacagttcatgcaactctcagagacttgaagaatgagtcaaaggttggcctcttaaagagccttccacaatcagaaggaaaactggtgctgttt

SEQ ID NO: 84199 - DNA, 240 bp, Glycine max
  Clone ID: 700955772H1
cggctcgagatcacagtgaagcagatgctcctgggaaaagacttgctaaaccactcatattttgtcgatccgagagtgactgtcctatggaaaatggctatgcccgacctgttgagggtatctatgttcttgttgatatgcaaaacatggtggtgttagagtttgaagatcgtaaacttgttcccctcccaccggttgatcccttgaggaactatactcctggtgaaacccgaggtggct

SEQ ID NO: 84200 - DNA, 237 bp, Glycine max
  Clone ID: 700955773H1
gattctagaatcatttgtagtaaaaaaggaaacatagaagctgttgctcttgtatttgctcaggacagggacaggtctttgggaactattaggtttcatgttgcattgtcaaatggtgtttcaactgtgggtcccagatacaaggcagcctcagttaaatcaaacaatgctgattgttcaacatggctcactgctaggagggaagggcaacaggaaaatcttgacggtcagagtatt

SEQ ID NO: 84201 - DNA, 238 bp, Glycine max
  Clone ID: 700955774H1
tgtcggaacataaggcggggaagagttagtttctactctcttcgatggcaggcggggaagaggttctcccttcggccactgccacctccgccgccaccggcaatcccaccgcttcgcctcctccgctcgctgatcttgtcggtgctcccgatctcgctgctgcctcggacgacgtcgttacccaacctgaaattcacgcgctgatttcagacgaagagcacgatcacgagcatgaaca

SEQ ID NO: 84202 - DNA, 222 bp, Glycine max
  Clone ID: 700955776H1
gcgttcattctgttttcgtaagtactgttgtttttctcttctatttctttctttgtttgtgttgtttttgtttcttccttatcgttgttctgtctctcctctgtttcggtgctctgttcaccacttccacgtgagaatgatcttgcttctgtgcatgttcattctctcgtgacctatggatcagactccatgttctgatccagggtctctctcgaacgcctg

SEQ ID NO: 84203 - DNA, 238 bp, Glycine max
  Clone ID: 700955778H1
agagaacaaagcacttagtgctattcaataattacgaaaaaccaacagcgagtgttgtttttgtttggtccaggctggaccagggaatgaatagagatgagaggctttcggttgaagagaactgagttaagcggcgaagccaaacgcagaatcggcggcagaaattgccaccggaagcacgtcgaagacgggtgaaccaaacacaaaattccatccaccacttctcttttcaatcccc

SEQ ID NO: 84204 - DNA, 240 bp, Glycine max
  Clone ID: 700955779H1
catttctctaacatcgtaagttactagaaagtgagagtcattaataagaatggtgtggcctttgaaggagagaggacgcaagctagggtggacaagaagcactttgtagtccctatctgcaactcctggccatagttggcgtgcgtcgtcatgtttttgttatatgttccacgtcttcctcttggtcttgcccctcgtggttccattttttggaggcacgagagtaccaacgagaagctg

SEQ ID NO: 84205 - DNA, 239 bp, Glycine max
  Clone ID: 700955780H1
ctttctcgtcactagctctgtgcattcttctctcgctctctgccttccatcacactcggcatttcctttcccaagatagtagaagatggcagacactgaggatattcaacctcttgtttgtgacaatggaacaggaatggttaacgctggattttctggagatgatgccccacgtgctgtgtttcccagcattgtaggtcgtcctcgtcacactggtgtgatggttggcatgggccaaa

SEQ ID NO: 84206 - DNA, 244 bp, Glycine max
  Clone ID: 700955781H1
cttctatggaaccatttctcatcaaattctttcccggtgtttataaacaaatgcaagatgatgttggccatagaagccaatattgcaaatttgacaacgagctccttacactcttcacctcttccttgtatcttgctgcattagtagcttctttctttgcttccaccactacaaggatgatgggacgcaaggcctccatgttcttaggaggcttgtttttccttgtgggggcattattaaacgg

SEQ ID NO: 84207 - DNA, 240 bp, Glycine max
  Clone ID: 700955783H1
caatttcatcaagcctgccatggcttcctcgtgtgcttcctctgccattgcagctgttgccatctccacaccaagttcccagaagaatggatcactcttgggaagcacaaaagcttcttttcttagtgggaggaaactgaaggtgaacagttttacagcaccagttggagcacgatccagcactacagtgtgtgcagttgctgagcctgataggcctctgtggttcccaggcagcacccc

SEQ ID NO: 84208 - DNA, 239 bp, Glycine max
  Clone ID: 700955785H1
tgctgacttcctctttgttttctgatctatggcttccaaggagttctctggtctttgctccttggctccttcactatctgagagcattttgtgcactactgggttgaaaatgtatatgctggagagcaaaggaggtgccatagcatgcatgttcttgtctcttttcttcttggggacatggcctgctcttttgactatgttagagaggcgtggtcgtcttcctcagcatacctaccttg

SEQ ID NO: 84209 - DNA, 238 bp, Glycine max
  Clone ID: 700955786H1
ctttttgaaaacactttagtttcgcaaagttgattctttctctctgtatctttctttccccaatttgtgagtgttactgttgaatcgattggattggcattaggttgatctgaaatacgcaattgacatggcgagcgcgatggtagaggacgcgaacttcgaagatgaccaactagccaatatgaccaccgacgacatcgtcagagcttctcgtcttctcgacaacgagattcgcatc

SEQ ID NO: 84210 - DNA, 239 bp, Glycine max
  Clone ID: 700955787H1
gaaaaactaaccgagacagaaagtgatcgcaatgttgcgacacttgggcgttcacgcgccgcgtttggccttcaacttcaagtcgagtttaattcacggtggcagaggcaaaacattaaccacacgcgcattctcgtcctccgccgccgtatcgccgccgtcgaaggcgatcgtgtacgaggcgcacggggaaccggacacggtgacgaagttggtggaggttccagcggtggaagtga

SEQ ID NO: 84211 - DNA, 239 bp, Glycine max
  Clone ID: 700955788H1
ctttcaatggcgaagtgcatgaccagttcttcttcttcttcctatgcactgcttctctttttcttctgctttctacaactggaggctattttggaccctgctgatttcctcgctctgcaaaacattcgtaaagctctgcaagacatgcctgcttccgatttcttctcttcctgggatttcaccgcagacccatgcaacttcgccggcgtttactgcgactccgacaaggtcatcgcgct

SEQ ID NO: 84212 - DNA, 237 bp, Glycine max
  Clone ID: 700955789H1
agctgctactggagggtctaatattctggccaggatagaagagtacaaaactatggtggtgcaagctaacgaagcgaatgacatgcattctggagaagtttatggggaaaaagcaattctcacaactgaactgaaggaacttcaatcacgcttgctcggcttgtctgatgaaagggacaggtctcttgcaattctcgatgagatccgccacattcttgaagtgcgactagctgcagc

SEQ ID NO: 84213 - DNA, 231 bp, Glycine max
  Clone ID: 700955791H1
gatgtctgcaagctcttttgtcgtaaaatgctcgagtggggaatgtttctttacgagatttaaactatattaaatgttgttgactgggctgtgtacgaagggctcctgaggttgtattttgataaatgaggatttggttctttcagatgcagattctatggagggtacgataatatcgaattattgtactgtggaaagactcggagaattcctatcattgtaatgttgttg

SEQ ID NO: 84214 - DNA, 233 bp, Glycine max
  Clone ID: 700955792H1
ctaccgtcttctgcctcggattcacgactcgctgagtctccgcaactcggaacgattccaccgaacgccgattctcaccgcaattcggtttgttcggatccgatgggtagcatcgtggaagacgccgacacagacacggtgtatgtggcggtcggaaagaacgccgagaagacgcagcaactgttgcattggacggttaagaatttctccggcaaagaaatctgccttcttca

SEQ ID NO: 84215 - DNA, 237 bp, Glycine max
  Clone ID: 700955794H1
gaataagagaatccaaaagtctctcaaaaaataaccatgatgatgcatgtcctttgcttctcagtgttcctagcagcagcaatgcaaggaacactggcggttgaatacagtgtcaccaacaacgccctctcaacccctggtggtgttcgtttccgtgatgcaataggggacgaatacgccaaacaaacacttgactcagccacccaattcatatgacgggtcttccagcaaaacgct

SEQ ID NO: 84216 - DNA, 238 bp, Glycine max
  Clone ID: 700955795H1
ctgggatgacatggaaaagatctggcatcacacattttataatgaacttcgtgttgctcctgaggagcacccagtgcttctcactgaggctcctctcaacccaaaggccaacagagaaaagatgacccaaatcatgtttgagaccttcaatgtgcctgccatgtatgtggccatccaggctgttctctccttgtatgccagtggtcgcacaactggtattgtgttggactctggtgat

SEQ ID NO: 84217 - DNA, 240 bp, Glycine max
  Clone ID: 700955796H1
gaaagatcacagaaagagaattcatctttctttgcgaacagctaaaaacctcaaagggaaagaaggcatgaatagaggtgttcttcagagctcaccagtgcaacaaatgatgactggaaaccctaactggtggaacatcaatatcaatagcatggctccacaagctcctcctttcttgtccactcctaacaactttcctatcccttgtgctcccacttctcttccctttccttcttggca

SEQ ID NO: 84218 - DNA, 250 bp, Glycine max
  Clone ID: 700955802H1
atttctttcacttcccttcaattttccaacgcaaaagttccttcaagctcagagcaaggttaaggttattgcatggattgggttggtggctttaattctgcacattggaatgctctggttcttaatttatgtgttagattttggcttagctggtgcagctttggcatttgatatcacgagttgggggatcacagtggctcaacttgtttatgttgtgatctggtgtaaggatggatggaatggattgtca

SEQ ID NO: 84219 - DNA, 246 bp, Glycine max
  Clone ID: 700955803H1
ataatagagtacatcttgagaatgcaattgttagggccagtgctgtgagcacactggcaaaatttggtgctgctgttgatgcgctaaagccccgcatatttgttctgctaaggcgatgcctttttgacagtgatgatgaggttcgtgatagggcaacactttacctgaacacacttggaggtgatggttcagttgttgagactgataaagatgtaaaggacttcctgtttgggccatttgatgtcc

SEQ ID NO: 84220 - DNA, 248 bp, Glycine max
  Clone ID: 700955804H1
gtagagaaccttcgtgtgaggtaactatacttatagctaaaatccacacgacttcttcctctcttcccgtctttctctctttctctctctccctcgatctaattcctcatgttatggtttgtaggtcaacagtaacaataccatgacccctttttgaatcctccatattcattccaatatggcttgtctttctttagggtttggatttggaggcttgtggtcaactaagaaggcaccaactgttttaa

SEQ ID NO: 84221 - DNA, 247 bp, Glycine max
  Clone ID: 700955805H1
agaatccacacaaactcagggtagggcagagagagagagagagagagagagagagagagagaatgggagggtgggctatcgcggtgcatggtggcgctggtgtcgaccctaatctcccactcgagcgccaagaagaagcgaaacaacttctcacgcgctgtctcaatcttggaatctctgctctaaattctaatcttcccgccatagatgtcgtcgaacttgtggtgagggaattgagacacggatc

SEQ ID NO: 84222 - DNA, 247 bp, Glycine max
  Clone ID: 700955806H1
cacgcacgtctctctctctctctcgccatggctatggctatgcaaagcggaatcggagtctccaagatcctcatcatagcaggagcaggttacaccggcaccgtcctcatcaaaaacggaaaactctcggatttaatcggcgagcttcagttgctggtgaagggattggaaaaatctggggagcatgctgaaggtgaaggtgaatatgctgatgccatagctgctcaggtgcgtcgcctggcgaatg

SEQ ID NO: 84223 - DNA, 128 bp, Glycine max
  Clone ID: 700955807H1
cttctgataacacatttggccagataaataacatcaaatagtggcttctgggctatctggagttgttttcttttcaaatgttggatgtctaagagatgattgaagttaattgggaattgagataagta

SEQ ID NO: 84224 - DNA, 247 bp, Glycine max
  Clone ID: 700955809H1
gtctcgctcttcttctcatcaagcacagagttacagactcaccgatcttccgattctctttcgtcttggtttatgagctcgaaggagagacccactcttggtggcacgcggattaagacccgcaaacgaaatattgctgcgccgctggaccctgcagcattctcggatgcagtggtccagatttatttggataatgctggtgatctggaacttattgctaagagtattgaatcttcagaccttaact

SEQ ID NO: 84225 - DNA, 246 bp, Glycine max
  Clone ID: 700955810H1
cggcttttcaacatgatcaatgaactgccaacaatatttgaagttgttactggtgcagcaaagaagcaagttaaggagaagtcttcagtttcaaaccacagtggcagcaagtctaagtccagctctaagcgagcttcggaatctcaggctagactgccaaagccattgcaatcaaaagaagaggatgaagaactggacgatcaagatgacgatgaacatggagagaccttgtgtggggcatgtggt

SEQ ID NO: 84226 - DNA, 245 bp, Glycine max
  Clone ID: 700955811H1
gctgaagtgtctgcttcttccgattccggcacgcccccatcaccatggtgaacgttccgaaaacaaagaagacatactgcaagagtaaggagtgcaggaagcacaccctgcacaaggttacccaatacaagaagggtaaagatagcattgctgcccaaggaaaacgccgttacgatcgcaaacaatctggttatggcggacaaactaagcccgtcttccacaagaaggctaagaccaccaagaag

SEQ ID NO: 84227 - DNA, 243 bp, Glycine max
  Clone ID: 700955812H1
cagaaatagagagtaagcctgagatcatggaaaaagttggtgtggctgtaaatagcaaaaatcaagaatccaaagcaacttccaccattaccattaagggtttcatgagccttctaatgaaaagtgtagatgagaatggtgatggtagcaagagagttatttctctgggtatgggtgacccaactctcaccacttattttcccatctcaaatgtagctgaaaaagctgttgctgaagcacttc

SEQ ID NO: 84228 - DNA, 242 bp, Glycine max
  Clone ID: 700955813H1
cgttcttcttctttttctctctctagaattttttttttctctctctctctcccatctctcggaaaatttttcagagcttcctaaagcctttagaattctctggaacctttttgttcgtccgccgaggatcgcaattcctccaaatcgtcgtcactcgtcgcttagttcggttctaactgcatgaactggttcgggaagctggattcatcatcgtcgaacttgaacttcaatcacttcgttac

SEQ ID NO: 84229 - DNA, 246 bp, Glycine max
  Clone ID: 700955814H1
ctcatcacaatgatgtagaaattgtcgaacctgctgagccaaaagctaaagagttcaagccgtgtgatgtgaaatatactgattatacaccttgccaagagcaagaccgagcaatgacatttcccagagagaatatgatctatagagaaaggcattgtcccgctgaaaaggagaaattgcgctgcctcattccagcccccgaagggtacacaactccttttccgtggcctaaaagccgtgattatg

SEQ ID NO: 84230 - DNA, 243 bp, Glycine max
  Clone ID: 700955815H1
cctcatcatagttttgctaacacaagtacattcattctcaaaaggtttaatttcatcctttctttccctctcttttcattggtgtgcactttcacttgtggagctagctgcaccaacagcagtggaaattgccttgttcttgagatgtctggtgttcttctttgggtgagttctggacccaaagagaacatcaactccttggtgagtttttcatgcaggagtggtggtggtggtgaaagaaca

SEQ ID NO: 84231 - DNA, 244 bp, Glycine max
  Clone ID: 700955816H1
ctctagactctgctctcaaacgccgtcgttttggaactctttttcttttccctttgattcttctctgtctttgtaaccgaaagaggggaaaatataattaataccgatttcgcaaccaattcttctcttgcgttgaattgggacaacgagaaattttggatctcagtttttggcaggaaaaaaaattgcatttgagtaaaaataacagagtgtagtgtagggtcttgttcttgatactgtgcta

SEQ ID NO: 84232 - DNA, 261 bp, Glycine max
  Clone ID: 700955817H1
cggctcgactgacaaccaagatgccattgatgcatcaattgttggaatgttagatgaccgtaaggaggcaagagcaggaatcaccgaggtgcatttcttgccttttaatcctgtggacaagcgcactgctattacgttcattgacaacaatggtgactggcacagaagcagcaaaggtgctcctgaggaaatcattgaactttgtggcctcaagggagagactctgaaaaaggcccacaaggttattgatgagtttgctaa

SEQ ID NO: 84233 - DNA, 247 bp, Glycine max
  Clone ID: 700955821H1
gagcatgcatgtgaagctgctgcctctgttgagtctaataatttaaagtcaaaacctgaagcagactgcgtgcatgttgagaaactggctgataaggacccttctgttccagaagattctaaacatttagttgatcaattcagcttcttgcctgagttgattgcttctgtaaaaaaggctgcattagaagatgccgaggaattgaaagctgcagctgatgagcctgccaattctcagaatcacaatt

SEQ ID NO: 84234 - DNA, 244 bp, Glycine max
  Clone ID: 700955822H1
catctttctctcttctctctccacccaaaccctaactcccgaccctgttcccctctcgtatccgtcatgaaaggaggaaagtccaagaccgaatctaagagagccgatcccaaacttgctgtgaataagaagggagccgccaccaaggctaggaaacccgccggcaaggggaaggcagcgaaagaccctaacaagccaaagaggcctccaagtgctttcttcgttttcatggaggagttcagga

SEQ ID NO: 84235 - DNA, 245 bp, Glycine max
  Clone ID: 700955823H1
ctcgagccgaatcggctcgagctggtttggtcccatatgatggacaggttcatctccaacaagacgaagacccacttactaccgtcactccgaatcggcgaagggggtgatagtgtgccatcgccaccaatcctcggaagcaacgaaggcgaagtgggtggagatcgatggagtgaagctgttggaggagcacgtccagcgtgttatggtgaagaaggccacacccgattggcttcccttcctcc

SEQ ID NO: 84236 - DNA, 245 bp, Glycine max
  Clone ID: 700955826H1
ggaacaattgacttcatcttcggctactccaccaccttgatccagaactcaaagatcttggtgaggaaacccatgccaaatcaacagaatatagtggtggctgatggcacaggccagaagaacatgcccactggagtagtcctccaaaactgcgcgatcatgcctgacgcttccctcttcgctgaccgcatgatcgtgaagacttacttggccaggccatggaaggcattctcaagggcagtgtt

SEQ ID NO: 84237 - DNA, 243 bp, Glycine max
  Clone ID: 700955828H1
gttccggaagaaaaactccgacaaaacggtgaaccagtactgccaatacgacagccagacactgacgatgttcacgtcgtccttgtacctcgccgctttgctgtcgtcgttggttgccgccaccgtcacgcgtaaattcggccggaaactctccatgcttttcggaggcttgcttttcctcgtcggtgccctcatcaacggtttcgcccaacacgtttggatgttaatcgtgggtcggatctt

SEQ ID NO: 84238 - DNA, 246 bp, Glycine max
  Clone ID: 700955829H1
cggctcgaggcagaaagcaagctcatcctagagttttaaaaatggcagcagcctcctccatggctctctcttccccatccttggctggcaaggccgtgaagctgggcccatcagcccccgaagtcgggagggtcagcatgaggaagaccgtcaccaagcaggcctcctccggaagcccatggtacggcccagaccgcgtcaagtacttgggcccattctctggcgagcccccgtcctacctcactg

SEQ ID NO: 84239 - DNA, 243 bp, Glycine max
  Clone ID: 700955830H1
gcgtcttggtttgtgagagagacagaggcacagagagaaaatggtttcggggtcaggaatctgcgcgaagagggtagttgtggacgcgcggcaccacatgctggggaggctggcatcgatcgtggcgaaggaacttctgaatgggcagaaggtggtggtggtgcgctgcgaggagatttgcatctccggtgggctcgtcaggcagaagatgaagtacttgcgtttcctccgcaagcgcatgaa

SEQ ID NO: 84240 - DNA, 223 bp, Glycine max
  Clone ID: 700955831H1
ggagaatgctaggtcagtggtcgatgccagcatctacttctcatagactagtgcattaccaaatgtattattatcgtttgaatgtttggacaatgacataatgttgttcttttcttgcatgcgtatgtaggttacaattgtacaaattctcaagtccccctcttcgcataccatttcatgaaaagaatatgcatgtttcctaactaagagccatcatgttgac

SEQ ID NO: 84241 - DNA, 248 bp, Glycine max
  Clone ID: 700955832H1
gtgaggcttaagcaaagaataacaacatcgcagaaggatgtaaaccgtgattttctacgtctccaaataattaggtgtcatagtgaactaaagttagataaagccttctccaatttcaccaatgattcgtggaaaaaagcttggcacttttactgtgagtttgggactaagggagttatgtttgactatcgtcgtcatggtggtaactgtctaagaggaagtagcctgctagatactgtgtcgttccg

SEQ ID NO: 84242 - DNA, 252 bp, Glycine max
  Clone ID: 700955833H1
atgaaactgatgtttctgtggtttctttggatgaacaactggaagactggactgacaaagaaattagtgatttttcttctttgataggtgggtcatatgctcctgatgcccttgagccattaaatggagtgcttaccattccattggcaaatggtgcctcagtgaatctccatatgtcaaagaaagcagaaaggaagttcatcgtaggtcttatgtctctcacacataatgtccaaagagcaattcaaatgc

SEQ ID NO: 84243 - DNA, 246 bp, Glycine max
  Clone ID: 700955835H1
ggaaagctttgagatttgttggacattttagagtggtgagaggatggtgggtgttatttcgttggtaacaggaatggctggtccaagtgggtttggatcagcttcaactgcagaacaggttactgaaggagttgatgccagcaacctcactgcaattatcacaggaggagcaagtggtataggattggagacagcacgagtgttggctcttcgaaaggtccatgtcatcattgcagtacgaaacat

SEQ ID NO: 84244 - DNA, 242 bp, Glycine max
  Clone ID: 700955838H1
cttccatgtctaaacactgaaatggcgtccatctctacgtgcatcactgtgacccccacttgtaggcttgctcggcggctactttccttcacctcgaagcaggcaatagcattcccttccgtgcagcaaaacccggtaattgggggagtcacgaaaagggtatgggattctagggttttggtggcggggccgggtggcgcagtggaaaccgacaagttgccttctgatgtgagaaagcgaac

SEQ ID NO: 84245 - DNA, 119 bp, Glycine max
  Clone ID: 700955839H1
cacaaccttgaagattgaaaagaattctgaaaaaaaaaattaaactaagaggttccctttcgcagttagtggcactgcatgtggtaaggaatcactcagtttaactttatatatgcata

SEQ ID NO: 84246 - DNA, 242 bp, Glycine max
  Clone ID: 700955840H1
gtcacgattctcgaggagccccaagggtttccaaaaattccgtatctttttgggtacccatttgagaagagatcactgggtttcagcctgaaattattggagttacatgggtttcccttgatctcagccgagaatcggtgtcactattgtcgatggaactcaactggggtggttgtgttgtgtgtgccaacctgaatgctgctgattagggaaaaacaaaaaagaaagaaagaaaagaataa

SEQ ID NO: 84247 - DNA, 245 bp, Glycine max
  Clone ID: 700955841H1
gcgttcgaacaaaattagggttttctcaaccctagggtttaccttctcttcccctgttcgaaattaggcaaatcaaaacagaaacacgactacaaaaagaagaaaagaagaaaaagaatcaatcattcattgatcgctgaaacgatacgatgacagggaaggcgaacgatagaagcacacggcgaaggagatcgcggcgaaggtggacgcggcgaccacgaaccgcggcggcgggaaggcgggta

SEQ ID NO: 84248 - DNA, 244 bp, Glycine max
  Clone ID: 700955842H1
ccatttttcttcatcccccaaagtttcaatctttgtattcaattcaccctttctctctctccatggccacttgtgttgatgccccaacccctctttctcggaagcctaacgggtcccaatccgatgatcattccttcaattacatgaaattctgccgacccactttctctgatcgcgttccctgcatacccatttgcaagaatcgtgacactgccttcacacgcgtggaggagtttgacacatg

SEQ ID NO: 84249 - DNA, 242 bp, Glycine max
  Clone ID: 700955844H1
cacaggaatagtcctccataactgcgagatcatgccggaccctaccctcttggcagaccgcttgagcgtgaagacttacttggccaggccatggaaggcattctcaagggcagtgttcatcgagaatgttatcggggacttgattcagccagatggttatattccatggaacccaattgaaccaaacacacaggattgctacttcgctgagtttggcaacactggaccaggttccgttgctc

SEQ ID NO: 84250 - DNA, 243 bp, Glycine max
  Clone ID: 700955845H1
agagaatacaccaaaacccaacatgaaaacccttaacaaagcctcacttattttattccctctcttgttcctttccctattcaagcattcccatgctgcaggaatcgctatctactggggccaaaacggtggagaaggcaccttagcagaagcttgcaacactagaaactaccaatatgtgaacatagccttcttgtccacttttggcaacggccaaactccacaactcaaccttgcaggtca

SEQ ID NO: 84251 - DNA, 245 bp, Glycine max
  Clone ID: 700955847H1
gtgagtgatcggtgttcacttgatccttcataagtcgtcatcatcatcatcatcatcaccgttgattgaagaagatgccgatcagaaacatcgccatcggaaggcctgaagaggctactcaccccgacacgttgaaggcggggttggctgagttcatctccaccttgatcttcgtgttcgccggttcaggttccggcatcgcctacaacaagctcaccgacaacggcgccgccactcccgccggc

SEQ ID NO: 84252 - DNA, 243 bp, Glycine max
  Clone ID: 700955848H1
gtgatgtcaatgcctgctttacctcacagtggtagttcttcaaagccattaatgatgtttagtgctgatggctctggaactctgacatcaccttcaaaccaattggctgatgtggaccgttttgtggaggatggatctcttgatgataatgtggagtcttttttatcccatgatgatacagaccctagagatactgttggtcgttgtatggatgtaagcaaaggtttcacattttctgaaata

SEQ ID NO: 84253 - DNA, 250 bp, Glycine max
  Clone ID: 700955849H1
gttggggttctcacgatttcgattcaccctttctcccacacactccgattctccttgtaaacagcggtgccagaagttgatataggatgggggcaatgatgtcgagattctggttcatgttattccctgcaaaagagtataagattgttgttgttggattggataacgctggaaaaaccactaccctttataaattgcatctgggtgaggttgtaactaccaaccctactgttggtagcaacgtcgaaga

SEQ ID NO: 84254 - DNA, 245 bp, Glycine max
  Clone ID: 700955850H1
caatctctcactccccgttttcatatacttatattatccggtggctacgttactgcatcctaaatggttcgagaaaaagatgtctgttgggaatatgctgagaaattagatggaaacaaggtaaggtgtaaattttgccaaagagttctgaatggtggcataagtaggttgaagcatcatttatctcgattcccaagtaaaggggtaaatccttgtagcaaggtcagagatgatgttacagatag

SEQ ID NO: 84255 - DNA, 245 bp, Glycine max
  Clone ID: 700955851H1
gggacaaatggaagccagttggcatctgtggcattctccagactacaaaaagagattgctaaagatggtagagaaccgaatgtgatttccaagggggtgcctaacaaatcgatttctagaaaaggttctgatgcaggagcctctgccacaacaggagaggagagtgctctatcacaattttgtgtggatctcactgcccgtgcgagtgaaggaagaattgatccagttgttggccgagaagttga

SEQ ID NO: 84256 - DNA, 249 bp, Glycine max
  Clone ID: 700955852H1
agacactgcaccaaacaccaacaacgctttagctctctctcttctctccataaccgccaccggcgatctggcactaacagatcgccgctgctacatctgaacccgatccagccaacagatctctccaattcaaatggagaatctaatctctttggtcaacaaaatccagagagcttgcaccgccttaggtgaccacggcgaaaacagtgcactccccacactatgggactctctccccgccatcgccgt

SEQ ID NO: 84257 - DNA, 246 bp, Glycine max
  Clone ID: 700955853H1
gcagcattgggagatagaaagagagagagaaagagagagagagaaagacccttacccttctctatcgctcgctttcctttgacgcttctgacccttgctttgtctgcgtcttccttctttctttctttctttctctgtgtgtcgtaatggctctcccagactcttcttcccgtcgcaactccctgatcccctccttcatctactcctcttcctccaaaacgctccctctccaccacatgctcaaca

SEQ ID NO: 84258 - DNA, 243 bp, Glycine max
  Clone ID: 700955854H1
cagctaactattagtgactataatcgatcaattttcaattttcaattgtgcccatcttcgttgctgccaccatgcataggatcaacaccgcaaggtccattttttctgctgttttcagaagcaaatctcggcctcactctgctgctttctccacctccttgctcttcgacgaaactcagacacagtttaaggaaagtgttgctcaatttgcaacggaaaatattgcccctcatgcttcgaaaa

SEQ ID NO: 84259 - DNA, 242 bp, Glycine max
  Clone ID: 700955858H1
ctgcgggcacaagtcccaaggcaacccccatggtatatatagatttaacgccaggggtgaacatggaattggatcatgcagctgcttccagtttctctctctaaaactcgcaaaagcgaattactgaaaccctagcctctgtttctgtgtttatttacttcgattctacgcatcgaattcaattctctgtgatctgaacccgtgaaatcaatgtgcctctttcggaatcgcagagcgagcaa

SEQ ID NO: 84260 - DNA, 228 bp, Glycine max
  Clone ID: 700955860H1
gtcacctgtgcatgtttcagggacctgtcagatttagttaacgtttttacatcatcactgtgtgaagataatatagatatggaaatctcccatgacatcaagatcaaggatgacaagctaggtggtgtgaaggaagagaagattaaggtagaagttgaactgaagaataaatcagttgagaaagagcatacaaaaagtaaagaagagaagaaacataaagatgaagat

SEQ ID NO: 84261 - DNA, 241 bp, Glycine max
  Clone ID: 700955862H1
cttctattctgtgctgttgctgaatcagaatggatggtgctgtgttggcatgtacagatggagcagttcttcccgtcagtcaagtgtttgatgcaattagagagcttgggaatggagggcttgagcaatgggatcctcttgttcttacttctgcctcactcttaagcaagttgcctgtggattcttcctctgttgattttgtgattttaatctggctgtcaattgattgtcctgtggatca

SEQ ID NO: 84262 - DNA, 247 bp, Glycine max
  Clone ID: 700955863H1
ctgagtttgtgttgtagagagaagttacgttctgagaggccaagatggattttaccttcgttcttgagcgtccctggggacttcctttgtgatatttctggttttgatgattgtgtttgcgtttctgtcaagtaggccagggaacaatgtggtgtactaccccaacaggatcttgaaggggttggatccgttggtaggagggtacaagagccgcaaccctttctcttggatcaaggaggctttgact

SEQ ID NO: 84263 - DNA, 131 bp, Glycine max
  Clone ID: 700955865H1
ctctcttctgccctctgcacctcccctcacacccttcctcattcgcaggaggtgaagatgtcgaccccggcaaggaagagactgatgagggattttaaaagattgcaacaagatcctcctgctggcatcag

SEQ ID NO: 84264 - DNA, 245 bp, Glycine max
  Clone ID: 700955866H1
attagttcttgttattcattattcattctcagcttcttttcttctggggggcaaaaggggtcacttttcagatccgagattgagctcctttacccatcatcatcatggagctcctcgggtacctgaatcagggtcacccttctagaggaacaacacttgttattactctttcattggtgctttcgacacttgtgtccttctccactttcacacatgccttctcttcttctgcgtttccggaactg

SEQ ID NO: 84265 - DNA, 247 bp, Glycine max
  Clone ID: 700955868H1
ggcctgggtgactctggtcccgccaacgaacccatcaaaaccttattcacttcttcccaattcagagacaccaaatggtccttcccttctgccccttccgcccctgtcacttgcaactatggttctgtaatgccttcatggtttgacattcttgagattcccgtggcagctgattctccaaatgacgagagtagtttacttaaagctgttcgaaatgtgcatgctactatagacaaggaaatagctg

SEQ ID NO: 84266 - DNA, 244 bp, Glycine max
  Clone ID: 700955870H1
cggcacagccattcccaaagagagagataagacaaaaaccacggttgcattgttgcattttgcatttaatggttgcaaccacaatccgttagtagattggaatggggaatggtgaatggtgaacggtgaaaagtgaattccagaaagcagagaatggcaagtagcggtgctgcaacagcggcgttgcagagcgatgcaagtagtagaatggaatgctggttgtaccttatacgcttcaaccgta

SEQ ID NO: 84267 - DNA, 243 bp, Glycine max
  Clone ID: 700955872H1
tggagaagaagaagggtgagctaaagtcaattttccttcctttcctttccactagtcacataatcccgctagtggacatggccagactcttcgccttgcacgacgtcgacgtcaccatcatcaccaccgcacataacgccaccgttttccaaaagtccatcgatttagatgcgagtcgcggtcgccccatcagaacgcacgttgtcaacttccccgccgcacaagtgggtctccccgttggga

SEQ ID NO: 84268 - DNA, 240 bp, Glycine max
  Clone ID: 700955873H1
atactcagtactccccattggggtataatagggacacgaggttgatgcggtggagctaagaaaatgaagcccttttgcacattcttcattcttctttcgctgcttgttattctcgttgaatcttcatgcaaaaacgaagaccaggagatggtgtccaaggccttccaatctgtgtctggattcaactcttcctggttcgaaacaggttccaactgttcaaatgctgagattaaagggata

SEQ ID NO: 84269 - DNA, 239 bp, Glycine max
  Clone ID: 700955875H1
ggaaaggtttggcttgaccccaatgaagtcaacgaaatctccatggccaattctcggcaaaacatcaggaagttggttaaggatgggtttatcatcaggaagccaaccaagattcactcccgctcacgtgctcgtaggatgaaggaggcaaagaggaagggccgccactccggttatggtaaacgtaagggtacaagggaggcaaggcttcccaccaagatactctggatgagaaggat

SEQ ID NO: 84270 - DNA, 130 bp, Glycine max
  Clone ID: 700955877H1
caaaaccacaatctaagtaagtgttgagagaagagtgcgtttgtctgtttgaaattaagtagtaaagatgtttggaatcatcggaggaaacaatggtcacaagataaaggggaacttggtgattatgcgg

SEQ ID NO: 84271 - DNA, 242 bp, Glycine max
  Clone ID: 700955878H1
aaaatcctcttacagcagcatttgtaattgtcttgttttcctaccctcaaaattcgttcgttcttctgtttttccttgtgtgtttctttcaatcttgtctaaagatagtgtccactgtttgtgtatctcagtgattaaatgtaactgcaatctcttcatcttgttcttcttctttgctttacttgaatctgttcttgttccttttttaaggttccttgcagaaaaatgtaattttggtttca

SEQ ID NO: 84272 - DNA, 242 bp, Glycine max
  Clone ID: 700955879H1
ctctctctctctctctctctgaagatggcttcacgcaggctcgtatcttctctgattcgatcctcccttcgtagatctcaatcgaagccctcaatttccgcatcgacatcgatatacacgtcatccaaccgtgcctcaccgcacggatacttgctgaaccgcgtcgccgagtacgccaccgccgcggctgctgctaccactcctccctctcctcctcctccggggaagaaggagctcggcgg

SEQ ID NO: 84273 - DNA, 246 bp, Glycine max
  Clone ID: 700955880H1
attcacaatccctcttcaggtttcgttattttttggattcttcgcctgattttgtgtcatataaatcgtgttactacagtgaagatatgacagaggatatgaaaattgatcatattgtggaagttcctgataccccagatagaacaactgtaaggcacgattatcagaaatatttaggtaatcctgataagagggggagagcttttaatgctgctgatgaaaataataaccacagtaactatatat

SEQ ID NO: 84274 - DNA, 248 bp, Glycine max
  Clone ID: 700955881H1
ctcttcttcacatcttcctccattaatacccttccctctctctcccatggagttgatctacctactctatctggttccaacgttgtacgcgtgtttcctcatatggaagatgttggacgagagaagggacagggagtgttacatcttaaactaccaatgctacaagccccccaacgacagaatgctcggcaccgagttctgtggcaagcttatcagacgcaccgaaaacctgggccccagcgagtacc

SEQ ID NO: 84275 - DNA, 245 bp, Glycine max
  Clone ID: 700955882H1
ctagactcttccttttctcttctctgtctaaggggtgccctgagatcacattgaacaatggtgaaggctgtggccgttcttggcagcagtgagggtgtcactggaactattcacttcgttcaggagggaagtggtccaaccaccgtaactggatctcttgctggtcttaagcctggtctccatggtttccatgtccatgccttgggggacactaccaatggttgcctctcaactggatcacattt

SEQ ID NO: 84276 - DNA, 105 bp, Glycine max
  Clone ID: 700955883H1
gttgtcccctttcacacactgatcttgatcagttgagaaagggaatcagaggagagaaaaaaaaaaaacatttgcgctctcttctccctttccatctctttatag

SEQ ID NO: 84277 - DNA, 246 bp, Glycine max
  Clone ID: 700955884H1
gagagcaaacaatgttgccaagatcaaagttgtggttcggaagagaccactaaataagaaggaaatagcaaagaaagaggaagacattatttacatagattcaaattttctttcatgcactgtgagaaaactcaaggttgacttaacagaatatattgagaaacatgagtttgtttttgatgctgtgctgaatgaagatgtttcaaatgatgaagtgtatgctgagactgtggagccgattgttcc

SEQ ID NO: 84278 - DNA, 243 bp, Glycine max
  Clone ID: 700955885H1
agaagttctaaggaagagggaatatgcagaatacaaggtgctagttgtctatttgcaataacaacatcagcgatccaaccttagtattcttcaacccagagagatttgtaataataaattacaacaacttaaacgatggcaggaggagcttatgtagattcgggaaatgcaaagcaatttgatgggaaggtcacggcattcgtattggttacatgctttgtggcagccatgggaggcttactc

SEQ ID NO: 84279 - DNA, 240 bp, Glycine max
  Clone ID: 700955886H1
gcaagagagagaaactaagacagaaagagagagaaagagtggttgaaagcgtccattgaaggtatagagagagaggttttgtgaattggtgctgcttcgtgtctgtttatttcctcgcgaggtttgaattccggaacagtgaagagaaacggaggttccgatcctgcgatgtgatatatgagagatctgtgaggaaattgaactggaaaaaaaaaatggcgacgtcggaggtatccatca

SEQ ID NO: 84280 - DNA, 240 bp, Glycine max
  Clone ID: 700955887H1
agaaatcacagctgaaagagggtactatcaataaaacagcgctacagatattgttcagaaatttctgtaccaaaaaagtaaacattgaatttattgcactggctcaacccccctcttcctttctggctcacatgcacttctttttctttctttgaagttcatctatccacacatacatatccctttagcctttattacaagcctcagatataactacttcacttgttgtgactaagctca

SEQ ID NO: 84281 - DNA, 239 bp, Glycine max
  Clone ID: 700955888H1
cacgcaagaaaacgattatgaacgacatcatcgcgtgtgctgctgctgcagctaactcttctcttccaacctctgtgttgggtgttcttcactttctccactcccgaggaagatcctcctcttgtgttcacactccctctgaacttctaagggactttgccacaagagagttcaatgcgtttctgtggctatgtctcgttgctgtcaccacccttttgctcagaagactcttcaatctc

SEQ ID NO: 84282 - DNA, 242 bp, Glycine max
  Clone ID: 700955889H1
gagcaacacaacacaaccagacccatcgttatcttatctccttctccatggcttccttacccagttttactccttttgtatttctattgcttgtcattggatgcaatgcaaggcctttgtatccacttcccagcaaaggtgatgatggaaataggaagcccctacaaacttttcgcccttataacattgctcatcgcggttcaaacggagagcttcctgaggaaactcatcctgcatacttg

SEQ ID NO: 84283 - DNA, 242 bp, Glycine max
  Clone ID: 700955890H1
tacctctgcatttttctctcgctctctgccttccatcaccctcgccatttcccttcccaagatagtagaagatggcagacgctgaggatattcaacctcttgtttgtgacaatggaacaggaatggttaaggctggttttacctggagatgatgccccacgtgctgtgtttcccagcattgtaggtcgtcctcgtcacactggtgtgatggttggcatgggccaaaaagatgcatatgttgg

SEQ ID NO: 84284 - DNA, 239 bp, Glycine max
  Clone ID: 700955892H1
aatcagatagcaaaagcaaaagaagaagctttaagccgaaaagatatattggacaaggttgagaaatggatgtcagcatgtgaagaagagagttggcttgaagactataaccgggtacttaaaatctcgcttcggctttatttctctttcttagtttgaataattggttgtgcacagccgtggatagagaggtgaagtagtagtattatgatcagaacatttactatcatgttaacaaa

SEQ ID NO: 84285 - DNA, 244 bp, Glycine max
  Clone ID: 700955896H1
ctacaatgtggagggggataatgggaggaagtaccttgttcctgctctgtatgatccttctacatcgtcttgctcaacgcccgtctgagaaggaggattattatggtgatgccgatcgttcagttctcactgctgctgctagcctgctactacgatgatgttagaaaccacggattagggagtgtacaaaacttctaataacccattttgtaggattatttcattgatttgtttgtttatatca

SEQ ID NO: 84286 - DNA, 273 bp, Glycine max
  Clone ID: 700955901H1
cttttgaaggatgtgaaccaagggagtaagctttatcaggctttgcggaggaatgatacagcagataagttccaaaaagtaactgaaaaaattgaagctgtgctcagtgaaattccttactgcaaacttgagatatcagaggaagttccgagaacagattgaactggtgcatgctcaattcaaaagagccaaagctcaaacagaatttgctgatatacaactagacctagatatggcagtggcgcaaaaagaaaaggaccctgatcctgctgt

SEQ ID NO: 84287 - DNA, 251 bp, Glycine max
  Clone ID: 700955902H1
gttacaagtcaacaaggatacagatgatgaagtagcccttgaagcctgtgaattttggtctgcttattgtgatgctcaactgccacctgaaaacttaagagaattcttgccccgtcttattccagtattggtgtcaaacatggcttatgcagatgatgatgaatcagttattgaagctgaggaagatggttctcatcctgatcgagatcaggatcttaaacctcgattgcacgtatcaaggtttcatggat

SEQ ID NO: 84288 - DNA, 268 bp, Glycine max
  Clone ID: 700955903H1
aattgacctatttgtatatacaatatgatgagtttgataatgctgcaactaccatcatgaaccattcacctgaagcatgggatcacatgcaattcaaagatgttgttgttaaagttgccaatgtggagttgtactacaaggctgttcacttctacttggaagagcatccagatcttatcaatgatgttctgaacgtccttgcacttcgtgtggaccatgcacgtgttgttgacatcatgcggaaggctggtcacctcggtcttgtgaa

SEQ ID NO: 84289 - DNA, 267 bp, Glycine max
  Clone ID: 700955904H1
caatggcaatggcatttccgtccgtaacctctgtaactgtggagaacgtgacattccctcccaccgtgaagcctccctgctcccccaacaccttcttcctcgccggcgccggcgtcaggggcctccaaattcatcacgctttcgttaaattcactgccatctgcatttacctccaatacgacgccctttccttcctctccgttaagtggaaaaccaagtctgctcaccagttaacggaatccgaccaattcttctcagatatcgtta

SEQ ID NO: 84290 - DNA, 265 bp, Glycine max
  Clone ID: 700955905H1
agagaacaaacaacgacaacaacaacaacaacaagctcaattgatgaaatgaaaaggatactgaagagtctgaatcattatgatgcccttggatttagccgccacaagaagattgatgctgcagttttgaaaaaggaatacaggaaaaaggctatgcttgtgcatcctgataaaaatatgggaagttctttggcaagtgaatcatttaagaagcttcaatgcgcatatgaggttctttctgactctgtgaagaagcgagattatg

SEQ ID NO: 84291 - DNA, 261 bp, Glycine max
  Clone ID: 700955906H1
agaaaacactaagagactctgcagtggctgcaaagtcgtttgcaccatagcttgttttgcctgtgacaagtatgatttgactctttgtgcgaggtgttatgttcgtggcaattatcgagttggtgtgaactcttcggattttaggcgagtggagataagtgaggagacaaagacggattggaacgaaaaggagaccacgaatcttctggaagctattacgcattacagtgatgattggaagagggtttctcagcatgttcc

SEQ ID NO: 84292 - DNA, 267 bp, Glycine max
  Clone ID: 700955907H1
tctcttctttctcttcttcttcctcttcttagcctccgccgccgccagcgtccccgcccacaacatcacccgcatgcttgccaaacaccccggcttctccaccttcaaccactatctctccctcacccacctcgccgaagagatcaaccgccgccagaccatcaccgtcctggccctcgacaatgccgccatgtcctccctcctcgacaagcacctctccctccccaccatcaaaaacgtcctctccctccacgtcctcgtcgacta

SEQ ID NO: 84293 - DNA, 251 bp, Glycine max
  Clone ID: 700955272H1
gcttgtgttacaactttgttggctgtgtcgtacatatacacagatatcttattatgttatgaataaaaacaaccaatatcccaatgttccacaataataattaaaaatataatttgtaattttgttctcaaagaaagaagactctgtccctgtgtctctgtatctgtctttgtctctgttcgtctcgctgaaggaatcgctaaggatcacattctttgcaggtttagtttctgcttctggccacctctcaa

SEQ ID NO: 84294 - DNA, 252 bp, Glycine max
  Clone ID: 700955273H1
ggacgaagttggcggcaagtttcgaagagagagagagaagaagcagtgggtggtcgaggtatcactttcttctccgcccccgccacgccctagaccgccgcgggcgttgccagcacgtcgctggaaggcggtggcttgttggcggcggagcttcgcgagattaggttcggatcgctcggtctcgctaggtcaccgctgacgagaatttgaacttctcgtcactactaagccgctatttagcttgtgttggga

SEQ ID NO: 84295 - DNA, 251 bp, Glycine max
  Clone ID: 700955274H1
gtatgtgcatgtgcatgtgcatacacacagtcctaatgtaaaacatgctgtttactctatttttcttttcaagttaaaatgatattaatgtgacttgctatattttacatatatgtctaaaagttctatgttttacttttaacaataaaatctatctcatgaatgttttatatgggtatcatctttgaatggttaaggcatttcagtttccaagtataaatgccaatatattgatgatgtacttgatgtta

SEQ ID NO: 84296 - DNA, 249 bp, Glycine max
  Clone ID: 700955275H1
aaggaacaaaaatattattaagatgatcaacattattggagcacttgttctactctttgcatttctcttcctcagttgtgtgtatgcacaagacacaacaacccttgtgcctgcaatcataacttttggtgattctgctgtggatgtagggaacaatgactatcttcccacccttttcaaggctgattaccctccttatgggagggactttgttaaccaccaacctactgggaggttttgcaatggcaa

SEQ ID NO: 84297 - DNA, 253 bp, Glycine max
  Clone ID: 700955276H1
ataaaaataatactatatataacatgttaattgcttaatatgtgctttaagagtaaagaataacatcgtgaaatcaaattacccctttttcaatacgtgttgaatcatcgatcttggtttgtaatttggttgtatattcacaaaattaataagtatattgtgatgtgattaattcccttctctgttatggtgtacttgccttccctgtattgtccatctccatcgtctgtctattaataagaattcttatgtg

SEQ ID NO: 84298 - DNA, 253 bp, Glycine max
  Clone ID: 700955278H1
gtcaaattggctgatgaagccgtttgcatcggggaagcgccgagtagccagtcctacttgctgatcccgaatgttctgtcagctgctattagccgcagatgcaccatgttgcatcctggctatggttttcttgcggagaatgcagtgtttgttgaaatgtgcagagaacatggaatcaactttattgggcctaaccctgacagtattcgggttatgggtgacaaagcaactgccagagagacaatgaagaaag

SEQ ID NO: 84299 - DNA, 255 bp, Glycine max
  Clone ID: 700955279H1
gcggcgggtactactgcggacgaggtgggctccgtcggcatcatcacatcagccttgtttgtttgtttgtttagtgattcttgctaaagtgggttctcaatagcacaaattcatatcaagcacttgagcatctatgggtataatcaggagtggcttctctttcatagcagggacagtatgtggagtttacttggctcagaattatcaagttcctaacgtcacaaagttagctgacactgccttgtttatggtaaa

SEQ ID NO: 84300 - DNA, 260 bp, Glycine max
  Clone ID: 700955281H1
attctattcctattcattcagctcactgatttcaattacaaagtcaattttgtaaatcagaggcagagagagttgtaaagagcctctgaattttgatcacaccacacccttcttctcatctccaccagaaatggctaccggagctgctgtgccaactacgttttctaccctcaagacatgggattccagtttggggtttgcaaaaaacatagattttgtgagagtttccgatatgaagagcatgaaatcttctgcgagga

SEQ ID NO: 84301 - DNA, 254 bp, Glycine max
  Clone ID: 700955283H1
gacagagagagagagagagagaaagaggggggcatgacacacaaagcagttggcacaaattagcagaaagttcaacaccccatagagctgttttcaaataaattctgttcctttttgtcccatcaagtcaacttaagacaaaagtttgcgtctttggaattgaggttctgggattttgctatatatgaattgaagtggagatgatattggtgtagtgggcttttcaactggtttggtgagatgaagggtgttct

SEQ ID NO: 84302 - DNA, 251 bp, Glycine max
  Clone ID: 700955284H1
cttttagtttctccactttcattctcactcatcgcaccctcttgcacagttaccatgaatttcttcaactgggttcatactttcatcgtttttcatgtctttgctgcaacaccccacttcttcttattagcagattcctccgaacaactccccaccaactttctagatgctgccaagaagcctgaggtatttgattggatggtcagaatcagaaggaagattcatgagaatcctgaattgggttatgaaga

SEQ ID NO: 84303 - DNA, 253 bp, Glycine max
  Clone ID: 700955285H1
aaaaaaaaagaaaaaggaaggagataggaaagggttaattgaatccaaaaaaaagaagagaaaaacaaaatgggcagggtttggacttcgatgatagcattgttgctttgcctgatgacatcatcggttcggggcgaggacccttacatttactacacatggaacgtgacctacggcaccattgccccattgggtgtcccccaacagggtatcctcatcaatggtcagtttcccggccccgaaatcaactcca

SEQ ID NO: 84304 - DNA, 253 bp, Glycine max
  Clone ID: 700955287H1
gtttctcaaacaatcattttttttttcttctgccccctttctctctctgaagcgaaaccctagaaattcatcatctttcagaatctgacaagtttcctcaaccgaacctaaattctctcaccaaatcctcacttatccaaattcgatactccaatccccacccaaattccccgcatcgactcccctccccaaaattcccccatcgtcggcgtctcccgtggccgaacgcatcacatcgccgattcggctacgg

SEQ ID NO: 84305 - DNA, 250 bp, Glycine max
  Clone ID: 700955289H1
gttttgtcttgtgattatccttgcaacacacattgtcttgtcggcaaaatcttccaccaacaacacacagtcatggcaggctcaaacattctttctcactctccttcccttcccaaaacctacagccactccttaaaccaaaacgcgttatcccaaaagcttttttttctgcccctcaaattcaaagccaccacaaaaccacgtgctctcagagcggttctctcgcagaacgctgtcaaaacctcggtgg

SEQ ID NO: 84306 - DNA, 251 bp, Glycine max
  Clone ID: 700955290H1
ctgagtccgaaaccattgatttaaaaaaaaatatagaacagagaggaagagagccaaatgggtttgggaatgagaagagagtagaaacaaccgagagagaaacacatagaaaaaggaagcatagccaacctgttcaaaaccatgatgcaaggctgtgaggttgaggccataggcataagctacacgatccacacacacaaatcggagaacccttttaaaatcttgagcaaatctgcacaagaacaacttga

SEQ ID NO: 84307 - DNA, 248 bp, Glycine max
  Clone ID: 700955292H1
tttctttctgcttaaggtctacacaagttctctgcttcttctccccctattgacctttggtcatcacaagcgaaaacccacttctggatcttctggtgtaaaggccattagaagctttagaaattttctaattgagttggtgtatagtgttgaagggggtgaaatctggagcccagtttgttagttgttactcacttcatctgtaagctcataggttgaaccctctttttttggagacttacctggga

SEQ ID NO: 84308 - DNA, 253 bp, Glycine max
  Clone ID: 700955293H1
cctgagcagactgccggtgataagccggaggaaggtgaggatgacgtcaagtcatcatgccccttatgccctgggcgacacacgtgctacaatggacgggacaaaggatcgcgatcccgcgagggtgagctaactccaaaaacccgtcctcagttcggattgtaggctgcaactcgcctgcatgaagccggaatcgctagtaatcgccggtcagccatacggcggtgaattcgttcccgggccttgtacacac

SEQ ID NO: 84309 - DNA, 247 bp, Glycine max
  Clone ID: 700955294H1
cccaatacctactctccgctcccaagagcacgcaccaccactattgcacttcttcctcgttctccctctttttcttcttcttcgctaaacccttttttctatctcactaacacaacaatgggagacgagaagaagggcaagcctgctgcttccggcgtgtggtccaccatcaagcctttcgtcaatggtggagcctccggcatgctcgccacctgcgtcattcaacccatcgatatgatcaaggtga

SEQ ID NO: 84310 - DNA, 254 bp, Glycine max
  Clone ID: 700955295H1
gcctgccttccccttctcataggagcttctatcactgagcaactatttctcaaggggtttggaggagactatggccatgcttactctagagcaacttctttggctcgtgaagctattgccaacattcgtaccgttgctgcttttggcgcagaagatcgagtctcaacccagtttgcatctgaactgaacaaacccaacaaacaagcacttctacgtggccacatatcaggttttggctatggcataacacagct

SEQ ID NO: 84311 - DNA, 277 bp, Glycine max
  Clone ID: 700955301H1
catggtgtcacatactctttaactgaggaatttgtgagtgcttatagaatacactcactcttgcctgataacttgcaattgagagacatatctgctaccccaggacctaacaaatctccaccattaatcaaagagattcctatgaaaaatttgattggagtgcaaggagacgaagcattgacaaaaataggagttgaaaggcaacttgtgtcaatgggtcatcaagcttgtggggccctagagctttggaactatccattgtggctcagagatcttg

SEQ ID NO: 84312 - DNA, 76 bp, Glycine max
  Clone ID: 700955304H1
ccaagccccactcaaccaccacaccagtctctctgctcttcttctagctttcaagtttttagggtcttaagacggc

SEQ ID NO: 84313 - DNA, 266 bp, Glycine max
  Clone ID: 700955308H1
cttctttcataaactaaaattagcttatgcacaagttaataccagatttgggagaagctaataggagagtttttacaaattagcttatgcaaaagctagttttagctcatgagaaaacttattttatttgtcattcttattttcttctcttaaataagtgttcatggagaagtttatccagaaaaggtactgctctgtttattttctgagtttctgttaaagcaagcaaatagttctaattgcactgcatatgagattgtagtagt

SEQ ID NO: 84314 - DNA, 245 bp, Glycine max
  Clone ID: 700955310H1
agggttccatcccatctattctatctatttagataaaacacgaaatcccaatcttaatcgcaagcaattcctctctctgagagaagctctcggaattcttctgatactcgtagacattttaatggcttgttcatcatccgattcaaaaaaaccagtgacgtcgctgttgttctcttccttcctaattccgataccttccgattctctttacgccctacgcatactcgatacttgtccatctctct

SEQ ID NO: 84315 - DNA, 265 bp, Glycine max
  Clone ID: 700955311H1
ccgagctagaagccactttggtttctttgcctttctcaatacattttcttttccatggaggtaggaagtgttcttaactttcttcaggacaagaccattttaattgttggagccactggctttctagccaaaatttttctggagaaaatattgagggttcaaccaaatgttaagaagctttttcttcttttaagagcttcggatgccaaatcagctaattatcgattgcacaatgagatcatagcgaaggacttatttattgtgc

SEQ ID NO: 84316 - DNA, 274 bp, Glycine max
  Clone ID: 700955312H1
ctcttattttcctttgtaatggaaagttagaaaccctcatcgtcaaagcacgcgttttttttaatctctctctctcaacaaatatttgtgggtagattcaattcaccatgtcgagctcatcggagtactctgaattttccggccagaaaccggcgaggtcgccggagaaatcgagcttctctcagacttgcagtctgttgagtcaatacatcaaggagaagggtagcttcggagatcttaccctcggaatgacatcatgtgggtcacctgagac

SEQ ID NO: 84317 - DNA, 270 bp, Glycine max
  Clone ID: 700955313H1
gaagacattcccttttgttgtcactgaaggacctgatggatatccattaattcatgcacggtacttgggtgaagctagaacatttacacccacccaagtatttggaatgatgttatcaaaccttaaagaaatagccgagaaaaatctgaatgctgccgttgttgattgctgcattggaattccactttattttactgatcttcagaggagggccgtcttggatgctgctactattgctggtttgcatccacttcgtctgtttcatgaaac

SEQ ID NO: 84318 - DNA, 278 bp, Glycine max
  Clone ID: 700955314H1
tctcgagccgaatcggctcgagccaaatcaaagacacctgagccattcaattcccctccttaattgctttcaagtttcaaacctaattttattatctgaaaaaatggctttcaaagtttcgtttttccttgcacttgttctagtttccaatatcctcctccttgatacaacagctgctggacgcagcattggcgaaaactccaactcagaggaaaagaaagagcctgagttcttgttcaagcatgaaggtggggtgtatattccagggattggacctg

SEQ ID NO: 84319 - DNA, 279 bp, Glycine max
  Clone ID: 700955315H1
ctcctccctctctcttccaaacacacatccacaaccatggcagcaccatcttcagagacaaagtcaccatcatcctccaacacgcagcttccgctgaaaccaatcccaggcagctacggaatgccgttttttggagcaataagcgacagacacaactacttctaccaccaaggacgcgacaagttcttcgcgacgaggattgaaaaacacaactccaccgtgatccgaaccaacatgcctccggggcccttcatctcctcggacgctcgtgtcgtcgcg

SEQ ID NO: 84320 - DNA, 279 bp, Glycine max
  Clone ID: 700955316H1
ccattttcaagctctcaacgccatctccagctgcttccttatcagaagcgcttcgccccagagattctcgcttcctctccttcaatccttcttccaacgctattaattacaaaattaacctctccgcttccctccgatccattcactccctccctcttaaaacctccttgcggatcaaatgctcccaaacagatgggaatggaagtcctgcaaagaggacagtgcttcatgatctttatgagaaagacgggcagagtccatggtatgatcatctctgca

SEQ ID NO: 84321 - DNA, 275 bp, Glycine max
  Clone ID: 700955317H1
gccaactccaatatgcatatccaagccgaacattcattgacacaggctcctgcagctgcttccaatacaactcaacagctgatgccacctctaacttctgactcttgggctgcaatgactgaatccattgatcattctcactcagaacaaagattgcaatcatcattgttgaatgttgataagcctgcagatgatggctacaactggaggaagtatgggcagaaacaggtcaagggtagtgagtttcctcgaagttattacaagtgcacgaatcc

SEQ ID NO: 84322 - DNA, 277 bp, Glycine max
  Clone ID: 700955318H1
aaaatattaggatcaagctccgagtatgtccaaagcaatataagccggtatttctctgatccccaatactactttcaagtgaatgaccactatgttaagaacaaattaaaggttgtgttgttcccattcttgcaccggggtcattggactaggattactgaaccagtgggaggtaggctctcttataaaccaccaatttacgacataaatgctcctgacttgtacattccattaatggcatttggtacctatgttgttcttgctggcatctcattgg

SEQ ID NO: 84323 - DNA, 273 bp, Glycine max
  Clone ID: 700955319H1
gcataacgtaaaaatacaaacaaatcaatgccctgtagggagtacagaaaggtttgttggtatattgtaagcatttatgcaaatattttctatttatgtaaagggcaatttggttcttgaggctcccacctatgtatcacatatgcagtaacacagacttatcctggtaagtgaagagccaatttttaaggattgaatgtgacctaggtcacaagcaaagcagcaaccttactggtgatgggttgcactcacgtgtttctagttgtgtatcac

SEQ ID NO: 84324 - DNA, 272 bp, Glycine max
  Clone ID: 700955320H1
aaggatttcaactttaggctccatctaaaaaaaatggctggtttggctagcaatcttcctctaattgttatgataggtctgcaaattcattatgcagcacttgccatattcacaagagccgctctcttagatgggttgagtacaacggtgtttgtagtatacaggcaaggcatagccactttggctttggcgcctatatttttctctcctaagaggagacaatcagtgaaagattctttgggattcaggagttctttttgctgtttgtgacc

SEQ ID NO: 84325 - DNA, 270 bp, Glycine max
  Clone ID: 700955321H1
atcaacacttgttctgaagtttcgcctgaagtgtgggcattaggaggatctgtagttgagtttgttttctccaactttgctcttttctttagcaacaacttctgtgatcttcttggcaatattgcatgtgtacctgctgaactggggtttcctagtgttggttgcaagagggtgcttgcttcatataatgaagctattttgtctaaagattggcctctagcttggagttgtgctcccattctatccaaacaacacactgttcctccagag

SEQ ID NO: 84326 - DNA, 273 bp, Glycine max
  Clone ID: 700955322H1
gtctttgaaatgttgtcaccccttcttctatttctatgcctaactcttcctttgtttttgttgtccttcttcaaataccgtaaaaccttcaagaatccaccacttccaccaggtcctagaggccttcccataatagggaatcttcatcaactagatagtccttctcttcatgagcagctatggcatctctcaaagaaatatggtcctttattttcccttcaatttggattaaggccagccatagttgtttcctctccaaaattggccagagag

SEQ ID NO: 84327 - DNA, 267 bp, Glycine max
  Clone ID: 700955324H1
atcagcaatggaacctgcattatgcagtgcacttgctctttcacccaaccaagtattcaacgcagcaaatcctggagatccgaaatgttcctttgacatatagcatacatcggagtgtcgtagtgacagtggcagccactggactattagggacaggtggtgggtcgtctgagaggtcaaccatagcagacaacagcatctggtcgggaatctgaactagacttgatgacatcgcggaaaacatccccaccctaccgagtcttgctg

SEQ ID NO: 84328 - DNA, 270 bp, Glycine max
  Clone ID: 700955325H1
cagaattgaagttagagtacctgagtatggctggactacgcagaaaatttttcatctcatgaacttcattgtcaacggagttcgtgctgtggtgtttggattgcacaagctagtttttcttttgcatcctacggtgttgatttcggtgctattagatctgccaggactactttttttctcaacatatacacttcttgtccttttctgggcagaaatttatcacaggcaaggggtttacaactgataagcccaagatagtctatatttcag

SEQ ID NO: 84329 - DNA, 267 bp, Glycine max
  Clone ID: 700955326H1
accaaacattttttttccatgaactttgcatctttctatcatcacatccatggccacagttgtgaagctccacgttttcccagaaagtttgaaccaacacaaaacgaggttgctcaggagaggctttggctcatgcccttcacctggggtgcttggttttggccataaaaattatgatcagttctctgtgaaagtgtgcagggcttttaggactgcagatggtggggatgtgaaggagaaaaagttcgaatttgaagaaaatgaaga

SEQ ID NO: 84330 - DNA, 268 bp, Glycine max
  Clone ID: 700955327H1
tttgtcacctttattctctttcagtagaacaacagcaacctctctgccttccaaacccacattctggaatttggttccaatgaaacaatcttcttctccggggcacttggccttagccttagacaatccacgtagaacacttcacgtgtcttgtggctccacatcaccacatgcttcccagagatcatcaattcaggggggtgaagcttttttcaggggtgtgttggcaagtatgcaatctgtttacttgaacagaatcgtactgcta

SEQ ID NO: 84331 - DNA, 230 bp, Glycine max
  Clone ID: 700955328H1
acgacgtcgtcttcgtatccgaaagcaccgggtcgccccgcttctacattacaaaacccgacactaaaccccagcctttaccctttctgcccaacgctctcttccacgatcgcccaatcgttaaaaacggaaagctctacttcgtttccacgcacgaagaaaacaccgccgttttcactagctggagcgccgtttactccaccgccatagatgactccaccgccacgtca

SEQ ID NO: 84332 - DNA, 272 bp, Glycine max
  Clone ID: 700955329H1
gagtcattgaactttgactatatttttcagagttcagattattcttctcttttgaattttgattttgggggtttaagtttctgagagaaaaaaaaaaatgataaaggtcgttctttttttgttctgctttgcctctgcactgaccctttcagtatcggagtccaaatctgcttctgtgcaatctcatgcagctgaatctttctctgttggatatattcagatgaaagatgcagcgaactgttcttacctggtagttatatctacgagttgtt

SEQ ID NO: 84333 - DNA, 273 bp, Glycine max
  Clone ID: 700955331H1
caagtgtatcgtttctggttagggcgcaaccgtctctgtcatcggatatcagcaattcagtgttccaaaccgacccgtttttcttcctcttcttcaaattccccacttttcaattggttccagaaaacaacaggttttgacgtgttggattcgaacaatggacacccgaagtggtgaagacactgttgatattgatcttggaggtgtttcatccagtggagaagcgattggggatatgggtgatgacattgtcacagtgctcactgggctgga

SEQ ID NO: 84334 - DNA, 256 bp, Glycine max
  Clone ID: 700955332H1
cttcagttcggtggagggagggagccgtagcagcggaagctctagcttgggtagcgaatcacaatggcgagaggattaaagaagcatctgaagaggcttaatcgcccaaagcattggatgcttgacaaactgggtggtgcatttgctcctaagccctcatctggaccacacagatcagggaaatgctgccactcatactcattttgcgtaaccggctgaagtatgctctaacataccgtgaagtcattgctattct

SEQ ID NO: 84335 - DNA, 276 bp, Glycine max
  Clone ID: 700955333H1
tcttgtggggttcccttctgcttcataagatagactccttcaaacacttagagggaagaagaaaaaaaaaacgtctagaatcaacataaagtcaggcatctggagattctgattccaagggaaggaagtgattgatggagaacaagtataggctaaacaggcagaggagtggaatatggaattgcttgagagatggagactttgaagaagaagaagtttgggctgttttcaaggaaaaacctgattacaacatttctggagttcacaagacaaggg

SEQ ID NO: 84336 - DNA, 134 bp, Glycine max
  Clone ID: 700955334H1
aagatattaacaagcttatattatttttatattgattgtacttgtaattagtactcaacaactttttacttggactaaaaaattattctctctatttaacaccagtccatcacaaagagtaaacatacattttt

SEQ ID NO: 84337 - DNA, 272 bp, Glycine max
  Clone ID: 700955335H1
agagaatcccatgaagactcctcttccttacataatcatatttggtatgtcaactccttttgtaatcttggccattgcttttgcaaatggttggattaaggtgcctgttcgatgagacaacactttacttctcattctcaaacttcaccagagaaattctttactttttcacatatgttatggctcgttttaatgaacaaagttcacttatgaatgtcggattgaggaaagcataaatgaggtttcttgtttcaagaatagcacgttggtga

SEQ ID NO: 84338 - DNA, 271 bp, Glycine max
  Clone ID: 700955337H1
gttgcttgcggtgccctagattttctctatcctttcaatcgttcccgaattccctcccgctagggtttcccatggattccgaggacgatatgcacgacgccaacgatgtggagtcccttgacgacgatttctacagtggcgagaccgaggacgctcccatggattactacagtgactacgacgacgaagctgacgattacttcgacgatgctgacgattctgaccgggttgagtctcgccgccctgagcaaaactttacaatattgaggga

SEQ ID NO: 84339 - DNA, 269 bp, Glycine max
  Clone ID: 700955338H1
cggctcgaggtgaaacggtgttctgatgtgagttgcgcaattcgggcgcgggctttgtcgaatttagcgcagtgcgtggggtttttgtctcgtggtgagaggactagtgcggttctgaaggagtttacggggtttgggagggttggtgatgggaatgttggaggtggaatgaatgatatgctgaggaggaggtgtatggatgataaggcagctgtgaggaaagctgcattgcttttggttactaacttgacttctctcttggaggtgca

SEQ ID NO: 84340 - DNA, 265 bp, Glycine max
  Clone ID: 700955339H1
ccagcctgagatggcggtgacggcagcagtgttgccaccagaagaagtagcccatgatggcagcgacaacagtggtgatggtggtggtggtgagatgattgggatggacttggatgcaaattcaggtgaaggaaatgaaggtaataataagatgagctttggagggaacggtggccccgccaagaaactttggctctcttgaagataaggtcggatatggatacagtttttcgagattcaagtcttgaaggtccactttgggaag

SEQ ID NO: 84341 - DNA, 270 bp, Glycine max
  Clone ID: 700955340H1
gaagttagttacaaattatccaagaaatgcgggtgtgaagaaaggcagcagcagagtggttaggtgtgaattgtgattttttctctccctctgaatattccctgtgtttcatccttatttgtcttttctgccatttttcatattggaattgtactagtcctcactggttgagagtggaatttgcatttagcagagcaataaaacagcacaatcttatttccatctttcctctgtcgcattgcataccttacatacccttctactccatgg

SEQ ID NO: 84342 - DNA, 270 bp, Glycine max
  Clone ID: 700955342H1
catttatgctggtccacttggccctaaatcttgtgaacttattagttatttcgaggcaatcgaaggagttccaaagatcaggtctggatataaccctgctacgtggatgctggaggctacttcttcagttgaagaaaacagactgggagtggactttgcagaaatctaccgaaaatcaagtttatatcaatataacctagagttggttgaaaggttgagcaagcctagtggtaattcaaaagaattgcattttccaacaaagtattgccg

SEQ ID NO: 84343 - DNA, 272 bp, Glycine max
  Clone ID: 700955343H1
tgtttagctacttacctcaatctttctcatgggaaagtttgccctagccaatatcctcttggtccttctcttgaacttgagcactttgctcaatgttcttgcttgtccctattgcccatacccttctcccaagcctccaaaaaagcctcccgttgtgaaaccaccggttcacaaaccaccaaaaccatgtccaccacccaagtcatctccaaaaccaccccatgtacaccctccctatgttccaaaacctcctcactagcctaaaccaccag

SEQ ID NO: 84344 - DNA, 272 bp, Glycine max
  Clone ID: 700955344H1
aatctaaccaatactataataatgctttgctttgttttgctacccctcctcctcctcctcctcctctcatagcctctctccatcaaatgatcaatcacttaacagctgcctcccactgcccgtacatcttgtttctctcctttgtgggaattcactgtgtctagatgctactaacacatttttaaggagcatcattcatcattgtttttgtgttcaatgcggataagtgctttaactaaccagctgtgaaggcttgtcggttgtgtagtagt

SEQ ID NO: 84345 - DNA, 242 bp, Glycine max
  Clone ID: 700955345H1
tgagatcatcgttgattgactgtcatgtttcccccgctggcatctcgttctcattctcattctcatcatttactgcaaaacttctgatcagaaccattttttaagaaagaatgatagcaatcaggtctaaaaaatccttcctcatatatctgcattatctagtagtctataaactttggaaggatcgtacagaattaactgcaataaatatgtgattcgtcatcgagccatttcatttattg

SEQ ID NO: 84346 - DNA, 255 bp, Glycine max
  Clone ID: 700955346H1
caaacacaacaacatatggaggtgctaagggtgcaaaccatagcttccaaatccaaagatgctgccatcccagccatgtttgttagggcagagacagagcaaccaggcatcacaaccgttcaaggggtgaaccttgaggtgccaattattgattttagtgacccagatgaagggaaagtggtgcatgagattttggaggcaagtagggactggggcatgttccaaattgtgaaccatgacatacctagtgatgtt

SEQ ID NO: 84347 - DNA, 275 bp, Glycine max
  Clone ID: 700955347H1
gattccctgcaaagaatctaaatgactaaatccaaatccaggatataaagatatcacacctatcatcatttcatttgtttcttctccccttccatgaacactactttctccctcttcttccatatcttttgattaattctagctatcatagttttaaaaaattcaaccatgcgcctcttctctttcccacactacaaatccttttggagatcttcaattgcatttgcatttttcttaacatttctcactctccaaacccaatccactccaatccc

SEQ ID NO: 84348 - DNA, 275 bp, Glycine max
  Clone ID: 700955348H1
ctctttttagcaactgttgctctgctctacgttaaggacaagcaagttgaagcaattcctctggatgatgccactcaaccctcttgtttctttcagcttttcggtgctctgaaagagctcaagagaccgatgtggatgctgatgctggtcacagctgtgaactgggtggggtggtttcttacttccttttcgacactgactggatgggtcgtgaggtctacggtggaactgctggggaggacgcgtacgcgaagggagtgcgcgtgggatcgtta

SEQ ID NO: 84349 - DNA, 275 bp, Glycine max
  Clone ID: 700955350H1
attgtttcctaccaagttctctgtctggggagttcttggcaccaccaccagcttatgcagtagctttaagctacgaaagattttccttgaccatggggcaaaagcatttagtgacggtgttctgtttatgggctttaacatgttcccttcttccatctttctcctttggaattctgagaattggtttgaagaagagacctctagatcttgatagtattaatgctgctagaaaggcaagagaaggtctaagatctgtaagaccaatgatgggtgca

SEQ ID NO: 84350 - DNA, 271 bp, Glycine max
  Clone ID: 700955352H1
tgagtttaaccaaatcatattaagccatggccacctccaacttctcaattgttctctctctctccctagccttctttctagtgctactcaccaaggcaaactcaaccaacaccgtttctttcaccgtcagcaagttttccccacgccaacaaaaccttatcttccaaggagatgctgctatctcaccctccggggtgttacgactcaccaaggttgacagcaacgacgtgccaacgacgggatccctaggacgtgccctttatgctgcccc

SEQ ID NO: 84351 - DNA, 251 bp, Glycine max
  Clone ID: 700955353H1
ctcttttaaagttctggcccgaaccctttctttcgtcacaatcacaacttggtaaaggtagtccgtgcaagaaagatgaagctcgagttcgcaaatgtgctacttctgtgccttgtccttagctcttctttcttggaaatctcaatggctggttctcgtaagccctctctccctccctccctcgatgatcactgcatgcaaatacagttactgcttgatttaatttgttgatatgctactaatgaagtgat

SEQ ID NO: 84352 - DNA, 251 bp, Glycine max
  Clone ID: 700955354H1
ggaaaatcttctctcttccctagttgaatgaattggaaacatgagttctggcaatgtgaagccagaagaagaagccctagaacaggagaatgtaggtgatcctgaccctgacatttcagaaccacaagagcagaaggctggcagtaactgcaagggcattgagcagattcctttgtctggggaaaatgaagaggatgtgctagttaatataactgggagtgggaccatagttcactggtggcagtgcagtg

SEQ ID NO: 84353 - DNA, 171 bp, Glycine max
  Clone ID: 700955355H1
tcggttcagtagcgtccgaacgaacttcaccactcagtctgttgcttgtgctgatgcattgcgccgtgaaccctcgctagctcactctccgctcagatccaagtttgtgttgattctccgatccgcaatgacgccgaggaagaacagaggcaaggcttcgtgttttcctct

SEQ ID NO: 84354 - DNA, 92 bp, Glycine max
  Clone ID: 700955356H1
gtattcgccctcttttctcatctcgaacatcttcgtcgtcacggaggctagtcttcctgttatcacaaacaatgtctgacggtcaagaatca

SEQ ID NO: 84355 - DNA, 269 bp, Glycine max
  Clone ID: 700955357H1
tcaacctgtaagatccgcgagctaaaactcccacactccacagcttttcttgttttcctttcctcagatcagatcttcacgccgttatgcttagaacattagctagggtgttcaagcgagccacccttgccaatgacttgcttcaaaaacgcagcagattctatgcaaccacggttggtggaagaagtgacaggttagaaggaaaagtggcactcataactggatcagcaagtggactcggcaaggccacggcccatgagtttgtccag

SEQ ID NO: 84356 - DNA, 265 bp, Glycine max
  Clone ID: 700955358H1
aatttacacaatattttaagacgcacataaacttcctctgtcactacccactcctctctctgtctccgcctttcgcattgcaagcactctctttctttgcttttacttccccctttcagtttcttcaacgctgcaactatccatggcaatctgctggctcatatccgatgtgtatccactgttcgctgcggttggtgccgctgttgggatctgtggattccaattggttcgtaatatctgcatcaaccctgaagtcagggtgaac

SEQ ID NO: 84357 - DNA, 246 bp, Glycine max
  Clone ID: 700955359H1
ggctcgagggcagttttgacttttcaccccactcctgctcttctatgacctaacgtgaagatcacaagagttccaagacgaggaagcttctgttctgtctaagcaaaggtcacatatgtgggcaagcatttatgaaagccttaagcaagtggtcccatggagacgcaagcaacagacgcagaaaaaatttgcttccaaatttgacactgtttgagtttttactcttgtcaaatggagttatttaaa

SEQ ID NO: 84358 - DNA, 269 bp, Glycine max
  Clone ID: 700955360H1
actcgagccgaatcggctcgagcaggaaagggaccaaacatggagaccatggccaacttacaattctcttcacttttaagtacaatagtttttcattgtttcatttaatctacaatggctgcttcaacaatggctctctcttcatcatcattggctggccaagctatcaagcttgccccctccacccctcagcttggtgttggaagggttagcatgaggaaaacagcctccaagactgtttcttctggaagcccatggtacggcccaga

SEQ ID NO: 84359 - DNA, 267 bp, Glycine max
  Clone ID: 700955361H1
cttacattctgacccagcttggctttcatacttgttttgtgtggcatagcaagagagagcgcaatggaaggtatctcagtgggtttgaagaagtactggagaagaagcattaggggataccaaagattacacgtctcggatcggcgaaagaaggaaacggttcagcttggaggcagccagagaaggaggagatggcgcataaagttagctcgtaagatcagaattcccaaaatctcttctccagagaattggtgctgtgggtcagag

SEQ ID NO: 84360 - DNA, 272 bp, Glycine max
  Clone ID: 700955362H1
gaattcacatttcaacaaccatagccatggctttctccttctccaaagcacttgtccttgcctgctccttctgcttatttgcgtctttggcttttggacgcgatttctccattgtgggctattcatcggaggacttaaagtccatggataagctcattgaactctttgaatcatggatgtcaaaacatggcaagatttaccaaagcattgaggagaagcttcttaggttcgagattttcaaggataacctaaagcacattgatgagagaaac

SEQ ID NO: 84361 - DNA, 265 bp, Glycine max
  Clone ID: 700955363H1
tgacgttctctgacgaggttccgccgttggcgcgtcacggcgtcccgggctgggtcagatatcgccggcgggattcgcctccttgctgttgggaatatcgctggcgttgatgctttgtggatcggtgacgttcttcatcgggttcgtgttgatgccgtgggttctgggattggtcatgctcttctacgtcgccggaatcctctccagcctctccgtcttcggccgctccattctctgctacgccaccgctccaccctcgccacgt

SEQ ID NO: 84362 - DNA, 275 bp, Glycine max
  Clone ID: 700955364H1
gcaaccctaatccaccccaacccaaccctattgaattgaattgggggaagaagaacatagaaagaagaagaaaaatctgcacaattgttgtaattgaacgatgtctgctgcggtgtgcggaagcaagagatctttgttcgaagagcttcccccttccccgccagtatccaagaggctccgctgttcctcctcccctattcgcctctctctcccttctctcatcgaccacttcgcctctcttccctcatatggatgacaggtctcgagagagcgct

SEQ ID NO: 84363 - DNA, 269 bp, Glycine max
  Clone ID: 700955365H1
atagcccaaaccctaaacgccgttggttattcccgccggcaaccatttcagtggcttcttccgccgtcgccgctcattgccagtgctccattttctgatcaggaagaatgaggcctacaatgatgcttagggctctaaccaagcagtttcttggaattgtaggcgatgcagcaaacactgttgctaagaagccccccctgcctcctcctctggtgtcacgcaaacctgctttcattgatgcattcttgtacaagatgaagaagaaccca

SEQ ID NO: 84364 - DNA, 270 bp, Glycine max
  Clone ID: 700955366H1
cgaaaaagttgttggtatcaggaagcagcttaaccaagcagcagaagccacagatccatctcagcctacttctgttcaatcttctgtatcatatgctcctttccaaactactgaagatgataacaagaaggcagcagcagctgccgttgctgctaagcttgctgcctctgcatcctctgcccagatgcttacatccgttctttcttctcttgttgcggaagaagctgcctccttgaatggtagcttaaattctacaggattttcatcagt

SEQ ID NO: 84365 - DNA, 264 bp, Glycine max
  Clone ID: 700955367H1
aaccaagcttctctgttaaaaaaaaattaggcgtctaaagggccaaagcttagaaagttgaagctttttttgttgaggtgaaagtgaaatggttggcaaggataatctgagggctgaggacttgaacttgtgctttaagaagcttatgatggtggccgggagtgggaacagtgagaaaggggtgaacttgaaggttggggtgatcaccgagtggaaggatattcctgtggagcttctgatgcaaatctgtccctgtggatgatc

SEQ ID NO: 84366 - DNA, 261 bp, Glycine max
  Clone ID: 700955369H1
actcgagccgaatcggctcgaggtgagaggagtgaatgtggtattagttgatggaagattgacgagtgttccagcaggagaacggaagaagaaaccggtgcggtggagataacgaatggcttgaaggatgtaacgacagcgcgtggcgtcgtccgaggaggttcttgaacggaggctggtggtgttgaggggacaggattcagatctgaatgtcgagcagtctcaaactcgtcgatctccagcctctccgccaatgaggtt

SEQ ID NO: 84367 - DNA, 268 bp, Glycine max
  Clone ID: 700955370H1
caaccaacacttgtttcttcagccatggccagtcaacctgaatcatctgacgcaaagggcacaaaaagggattttagcaccgccatattagagcgtaagaaggctccgaatcggctcgtggttgatgaagctgtcaacgacgacaactctgttgtcgcgcttcatcctgataccatggagaaacttcagctttttcgtggtgacaccatcttgatcaaggggaaaaaaagaaaggatacaatatgtatcgcacttgctgatgagacat

SEQ ID NO: 84368 - DNA, 266 bp, Glycine max
  Clone ID: 700955371H1
taagaacgggcacttaaaagagtttgaaggagcttcccagagactaactctgcataaggttgacctccttcatcttgactccgttagatctgttattaacggctgtcatggtgtctttcacactgcttctcccgtcaccgataaccccgaagaaatggtggagcctgcggtgaatggagctaagaatgtgatcatagcagctgcagaggctaaagttagacgcgtggtgttcacctcatccattggtgccgtttacatggacccca

SEQ ID NO: 84369 - DNA, 261 bp, Glycine max
  Clone ID: 700955372H1
cctttgcctccttttcatggtggtccccaatctcagccatatgccattccatctcgcggggcagttcatggacccgttggggcagttcctcatgttccatctccagggagtcgaggttttggggctgggagatgtaattctggtgctccaatctgcaatcatctagcacatcaacatggcacccaacagcctattgggagtattggatctacatttgacttccccgctgtagagattcccaacatacagccatctgttggt

SEQ ID NO: 84370 - DNA, 244 bp, Glycine max
  Clone ID: 700955373H1
cataattgtgttagccaagaaatgaagaaatcccagcaaaacgttgttgaagggagagttccctctccgaaacaacaaaaccttgtcgccgtcaccgtcgctagaaccaccactaccacgagaaccaccaccaccagcagctatgtctttgaataagggttcggggaaactgtctgccaaagagaaatatgctctgattcccgataacttcaccaccctagaacaggttacaattgccttgagg

SEQ ID NO: 84371 - DNA, 266 bp, Glycine max
  Clone ID: 700955374H1
caaaaatggcacctgcaacactgtctctgtctctcctcctcctgttctcactcagcatcgccgtaaccgttagatcgagcgactacgactacgattgtgtgtacactgcatacgttagaaccggttcggtgttgaagggcggaacggactctaagatcgggctgaagctgtacgacaagtacggctactacatctacattaaaaacctcgaagcatggggcggcttgatgggcaagggctacgactacttcgagcgcggcaacctc

SEQ ID NO: 84372 - DNA, 266 bp, Glycine max
  Clone ID: 700955375H1
agaatttcacattttatcttttgcattgagcaactaactcactcgcgccatggctgctaccatcatcaccacatgcaagctctcactgcttttgagtcttctctcagtttcacttttgctgggtgtgaggtctgatacccttcagaatgtaggcgcaattccccccacatgcaagcgcatagagtgtcccagctatgatgtcattcacgtaggcaacggctacgaaatccgtcgctataattcacccgtttggatttcaaacagcc

SEQ ID NO: 84373 - DNA, 90 bp, Glycine max
  Clone ID: 700955376H1
agtggtttcagtgagtgatcggtgttcacttgatccttcataagtcgtcatcatcatcatcatcatcaccgttgattgtagaggatgccg

SEQ ID NO: 84374 - DNA, 270 bp, Glycine max
  Clone ID: 700955377H1
tggttaatgcttttggcaactcaatgcaacatgtgcagtattctggaaaagataccgcaatggtgccaccacattgtaactcggacacccaaaatcctattctatttggggtcaacatcgattcatctggtcttctgctccctacgactgtcccgcgttatactactgcatcagcggatagtgatgcatcagcaatgccattaggagagtctggattccagtctcctttatatccttgtggtcaagattcatcagagttggtgcaaagtg

SEQ ID NO: 84375 - DNA, 272 bp, Glycine max
  Clone ID: 700955379H1
tagctatctatttatctatagcaagtgcgtcaagagacacgtggtaccctagctagagtgccattctgtggtttctttctttctttctttctgcatcacatcacaatttgcattgcctcgtgtcctttttcttctttgctctccaaaaatctcacacacacaggtatctagcaaatgggttctcaccaacaagaaccatggctattggagaatgggaaaccaagggttttgaccaaggagaccaggcatggccgttctgcacacagaatgtc

SEQ ID NO: 84376 - DNA, 273 bp, Glycine max
  Clone ID: 700955380H1
acggatcgaagagatgcattgcattgccgcgctttgaaaattgagcctgcaccttccttttcggtggggcagaaatttcaatttgatgatattatagaagctcaacagtttgatagagatattctcagtgccatttttgaagttgcacggaatatggagaacgttgaaaaggattctcctggtagccagattttaaagggttttcttatggccaccctattttatgagccttctactagaactagactttcatttgagtctgccatgagaaga

SEQ ID NO: 84377 - DNA, 268 bp, Glycine max
  Clone ID: 700955383H1
acctactgcagtagatgatgaaaagatggatgtttctacttcaaggaagtatggttcagagagctggatgtcaatggggaggaatgagcctacatattcggatcttctttcaggctttgggaccagtggggatccttctcattcatccctgaaggatcaaatgagccctgcttattctgctagaaagcaatcattggatcatgaaggcaaacttcacatgcctcatccgtggcctgtaatgccctctagtctgtcactgaacatcttg

SEQ ID NO: 84378 - DNA, 265 bp, Glycine max
  Clone ID: 700955384H1
attaagattttaagcgattctcgttcggctcgggatggctggccgctgaaccggaccggttcggcttggagagatcttgttgggctcggaaacacgcatttgcggcggtgatgagagggagctgctgctgctggaaccgtcggacagagcagcggttccgcctccaccgcgatctccaccgttaaatcactcaagatcaagcttctcctcttttgctgcgtcgccttcacgcttctcgccttttccaccagcgcttcttccttcg

SEQ ID NO: 84379 - DNA, 260 bp, Glycine max
  Clone ID: 700955385H1
cctactcattctccatacctcaacgaagaggttaaagagacggcaacactttgctgtccgccttgaccgagcagagcttcgtcttggccctcgattttgccctaaagtactctcagtcacaacagacaccgtcgtcgtcgtcgtcgtcatcaatggcaccgaagcagaccaaggctgagaagaagatcgcttacgatgcgaagtgtgcgacctaatggaggagtacggccagatcctcgttgtgaactccgataacgtgg

SEQ ID NO: 84380 - DNA, 265 bp, Glycine max
  Clone ID: 700955386H1
ggtttacaagcttggcaaagctggagatgaatctcactctgctcttactgagtttgataggaccgagaaagacattaccccaataggtggtttccctcactatggtgttgttaaggatgattatatcatggtcaagggatgctgcgttggtcccaagaaaagggttattacattgcgccaatccctccttaagcagacttctcgtgttgctctggaggagatcaagctcaagtttatcgacacctcttcaaagtttgggcatggt

SEQ ID NO: 84381 - DNA, 255 bp, Glycine max
  Clone ID: 700955387H1
gcagtagcattaagagtccaagcagataagtccattttctacaattgctcaatggatgggtatcaggacactctttatgtccacaccatgcgtcaattctatagagatcgcacgattatcaggtaccattgacttcgtgtctggtaatgcacttgctattttccaaaattgcactttcgtggtccgctagccattggcgaaccaacaatgcattgtgactgcacaaggtagaacagagatacaacaaccatctgg

SEQ ID NO: 84382 - DNA, 263 bp, Glycine max
  Clone ID: 700955388H1
gtccactttaaggatgtagcattggcacatattttggtgtatgagaacaaatcagcggctggtaggcatttgtgtgttgaagctatctctcactatggtgactttgtggcaaaagttgctgaactctatccagagtataatgtgcctaagatgcaacgagatacccagccgggattattgagaacaaaggatggagcaaagaaactgatggatttgggtttgcaattcattccaatggagaagattattaaggatgctgtaga

SEQ ID NO: 84383 - DNA, 263 bp, Glycine max
  Clone ID: 700955389H1
gtgtttcctttcgccgaaaccctcgctcgcaacttctacagaatccctttcaccatggatattgaggaggacatccgttctttacagctcgattcagcagaagacaataatggggtggtaaatgcagaggatggaaggccagaagaagttgagaaatctgataagatggatgaagatccaaagcaggatgttgaggctgagccaaaggctgttgaggctgagccaaaagtgaaggataaggaggttccttctgttcaagatga

SEQ ID NO: 84384 - DNA, 257 bp, Glycine max
  Clone ID: 700955390H1
ccttactgacggagaaagagaatgacagaggtactcctgctctatctgaggtttgggaaatcaattcagcattagagcccttgtggcatgagcttagctgttgcataagcaagatagaatcctactcagagtctgcatctgagatttcgacatcttctagtacctttgtgtctaaaccatctggtgtaatgcctccacttcctgctggctctcaaaatatcttaccatacattgaatctttctttgtggtttgtgag

SEQ ID NO: 84385 - DNA, 260 bp, Glycine max
  Clone ID: 700955391H1
ctgtaattgcatagggaaacaacatctctatagctatatgcagctaggagactcaagtgtgttggagatctcctcccataccgagcccgagatggcggtggtgtcgccaccagaagaagcaccacatgaaggcggccacaacagtggtggtggtggtggtagtgatgagatgattgggatggatttggatgcaaattcaggtgaaggaaatgaaggtaacaagatgagctttggagggaaccggtggccccgtcaagaaa

SEQ ID NO: 84386 - DNA, 265 bp, Glycine max
  Clone ID: 700955392H1
gaaattccaaaaccatgtcgtcccacagtcatctaagtttcgcctttggggttctaggtaacatcgcctccttcgtgtgctttctggcaccactaccgacattttatagagtttgtaagaagaaatcaaccgaagggttccaatcaattccatatgtggctgcactcttcagtgcaatgctttggatcttttatgcctatgtgaagaccggagaaatgcttcttatcaccatcaatgcattcggttgcgtgattgagaccattta

SEQ ID NO: 84387 - DNA, 270 bp, Glycine max
  Clone ID: 700955393H1
cctcgagccgaatcggctcgaggaagtgagggcaagaactttgcagactaccagcatgagcaagaagctcctccagctcttcagcctactcccattcttcctctacttctacacaatagaagcagacgttggcccattgcaactgacacacccactggaccccttaactcagcaagaaatcaccctcgtcaaaaccatagtcctacaaaagtaccccaagccagccaaccgcgtcttcttccactacgtcggcctcgacgatcctgacaa

SEQ ID NO: 84388 - DNA, 268 bp, Glycine max
  unsure (1)..(268): unsure at all n locations
  Clone ID: 700955394H1
gagacaggagaacggaattgaaagcanacatagcgaactgtcctgtgtacatgcagctatttctttcaatgctgcatgtacccgtgacagaaatagctgatttggtgcatcttgcagccttgcgactatctccaatagttatccagaaaatgccgagtgtcttcagtaaggacactgagattgtcacgtatgtcgagaatatgttgaggctggagagtggtgcaattggagaaactgttggttctaccatgctgcctgctcttgtggg

SEQ ID NO: 84389 - DNA, 250 bp, Glycine max
  Clone ID: 700955395H1
ctagcatcaagatatcaaaaattcctattatctgcatttgcaatgaccgttacagccagaaactgaaaagccttgtgaactactgtttgcttctaagttttcggaagcctacaaagcaacagatggcaaagaggttgatggatgtttcaaaggctgaaagacttcaagttaacgagattgcacttgaggaactagcagaaagagttaatggagatatgcgaatggcactaaaccagttacagtatatgag

SEQ ID NO: 84390 - DNA, 272 bp, Glycine max
  Clone ID: 700955396H1
ggcttccctccctcctttgaagaaacaaattagaagagtgtgttgtgttgtgttgaagtagcaagctagcaaagatgtttggcatcttaggaggcaataaggggcacaagatcaagggtactgtggtgttgatgagcaagaatgtgttggacttcaacgaaatagtgtccactactcagggtggtttggttggtgctgccaccggcatcttcggtgctgccaccggtattgttggtggagttgtcgatggtgctactgccatcttcagtcgc

SEQ ID NO: 84391 - DNA, 290 bp, Glycine max
  Clone ID: 700955402H1
gactggcattcggctcgagctcgagatctcgacgatgcaagcaacccctttagtgctcttcctcctcttcaccatagccaaagggcttcacaaccccaaatgtgatgctacccatcaacatgaccatgatggctcaaccctccaagtgttccatgtgttagcccatgttccccatttaggccctcaaagccaatgtcatgggaagagagtgtcctaaagctacaagccaaggaccaagccaggatgcagtacctttctagcttggtggctaggaggtccattgtcccaat

SEQ ID NO: 84392 - DNA, 266 bp, Glycine max
  Clone ID: 700955403H1
atcaccagaaagtcatgtatatggcccattgcctgattggatcgacacgtcaggcgcatatttaatttcaccagaaatgggttcacactttgtaatgtacctagctaagttgaaagaaaaatcaaaatcaggactaccctgcctggtgtggagagatttatctttgtgctccaaggtgctgtcaccctcactaatgctgctggtgttagccaactactgaaggttgattcttatgcttattttcctccaaattttgaacattcaat

SEQ ID NO: 84393 - DNA, 249 bp, Glycine max
  Clone ID: 700955404H1
aaatattaagatgctaaacattggaacacttgttgtactctttgaatttctcatacacaattatacctatgacacaagacacaacaacccttgtacctgcaatcataacttttagtaactcaaccgtagatgtagaaataatagactatcttcccacccttttcaaaactgattaacctacttatgaaaaggactttagctaacaccaacctactgagaagttttgcaatggaaaattaactactgatt

SEQ ID NO: 84394 - DNA, 263 bp, Glycine max
  Clone ID: 700955406H1
agcattataaagaatgcctgtccatggcagttgataatcttcctgttcttgatgggaagactccagtccaagtgtaccagagtttctgtgagagcttcaagtcttcattctctccattcatgggctctacaatcagagcatttccatgggtttaggaccagatggtgagctacgttatccatctcaccactggctgccgagtaatggtaaaactcaaggtgctggggaattccagtgttatgaccaaaacatgctcagctttc

SEQ ID NO: 84395 - DNA, 263 bp, Glycine max
  Clone ID: 700955408H1
atttcttacctcttggcatggccattcaaatgtcttcttttgtctttgtttctcttacaattttattttgcttctcttccttggagaagagttttgcctttcaaacaacaaaggaggacacagaaagcaacaatctcatcaatatactcatcttgttcacctcagctcactccttccttcatcttcctgcagctcttctgccaaaggtcctaaaagaaaagcatcattagaagtggtacacaaacatgggccatgctcccaac

SEQ ID NO: 84396 - DNA, 263 bp, Glycine max
  Clone ID: 700955410H1
gaagtgcaaaaacagtgtaacaaaaagaaaaagaaaaacaatatgaagttcactataatcacaatatttttctctttatttctacttgactttggttttgcacaacagggggatcttgacatatcaagatttggagaaaaccaaatacaaatataggccaggctttcttaagtgcctggactcaagcatgtgcatcaccaactgctgtcaaaattgtgattccagctggcacataccaaatgggtgcagttgatgtcaaaggt

SEQ ID NO: 84397 - DNA, 261 bp, Glycine max
  Clone ID: 700955411H1
cttctccctttttctctctgtctctctctctcggtctcgctctacttctcatcaagcacagagttacagactcaccgatcttccgattctctttcgtcttggtttatgagctcgaaggagagacccactcttggtgcacgcggattaagacccgcaaacgaaatattgctgcgccgctggaccctgcagcattctcggatgcagtggtccagatttatttggataatgctggtgatctggaacttattgctaagagtattg

SEQ ID NO: 84398 - DNA, 263 bp, Glycine max
  Clone ID: 700955413H1
acttactcctcacactttctctatctttttcatctctgtttcagatctgagctctcgtatattccccagccatggccgaaaaggtcaccataatgaggctcaaggttgatcttcagtgccacaaatgctacaagaggtcaagaagattctctgcaaattccctcaaatccgagaccaggtgtacgacgagaagaataacatcgtgaccatcgcggtggtttgctgtaaccctgagaagctcagggacaaaatttgctgcaaag

SEQ ID NO: 84399 - DNA, 265 bp, Glycine max
  Clone ID: 700955414H1
gggcttctgaattatcgtgttttgatcagaatctgaggagaaaatcacataatttcgaatttgagttttcgtgtagaaaaaggaagagaagaaaatggaatcggaggatttggtcaaacaggaattggaggaattgcagaaacaattggggaagaagcaaaagtttgaagcttctgtttcgtctcttaaaacccttctccaacgcacttacccatcagcttccccggcgcttcgtaaatccttttaatcagttctatgccgagtt

SEQ ID NO: 84400 - DNA, 279 bp, Glycine max
  Clone ID: 700955415H1
gctttcggctcgaggcttttgaaatgttgtcaccccttcttctatttctatgcctaactcttcctttgtttttgttgtccttcttcaaataccgtaaaaccttcaagaatccaccacttccaccaggtcctagaggccttcccataatacggaatcttcatcaactagatagtccttctcttcatgagcagctatggcatctctcaaagaaatatggtcctttattttcccttcaatttggattaaggccagccatagttgtttcctctccaaaattgg

SEQ ID NO: 84401 - DNA, 246 bp, Glycine max
  Clone ID: 700955419H1
ggcgttccttatactattggtttcaccaaatagggcatcatactgcagcctaatcttgggaagattttttttgttattttgtgtgcaaattaatgtgtctatgtagaataaataaattagctttgttttcagcacattgttgtgattcttcttccaagctagggtggaatcatatcatatcttgtacaaattaaacatgagaaaactgtacagctaatacatgtgaaatttttatattgttttttg

SEQ ID NO: 84402 - DNA, 263 bp, Glycine max
  Clone ID: 700955422H1
atttgaggccaggcaagccccactcaaccaccacacctctcctcgttcacgctacccctttctgctcttcttctacctttcaagttttaaaagtataaagatggcagagacattcctatttacctcagagtcggtaacgagggacaccctgacaagctctgcgaccaaatctccgatgctgtcctcgacgcttgcctcgagcaggacccagacagcaaagttgcctgcgaaacatgcaccaaaaccaacttggtcatggtctt

SEQ ID NO: 84403 - DNA, 244 bp, Glycine max
  Clone ID: 700955423H1
ggtcgaaagagaattaaacgtttgccccttgagcattatttgtagtcatgttcatcagaataagacagatctccaacatataacacaccctctcctccactctccaaataatgctcaagggtcgaaagagaattattggagagtggaggagaggctgtgttatatgttggagatctttcttattctgatgaacatgactacaaagatgctgggtttacggtgggatacatggggccgatttgct

SEQ ID NO: 84404 - DNA, 263 bp, Glycine max
  Clone ID: 700955424H1
gtcgtaatatacctcatgctgaactgccttccaagattcagatgtatttctttcttgtattctttgcccaaattgtcctacaatataaagcaaattcatgcccaattaatcactaatggcctgaaatctcccacctctgggccaagttaattgagcattattgtggctcaccagatcaacacattgccagtaatgcacatttggtgttccagtactttgacaagccagatttgtttctcttcaatactttgataagatgtgtg

SEQ ID NO: 84405 - DNA, 262 bp, Glycine max
  Clone ID: 700955425H1
ggacactttaccgtgatatttccaagtacaatcaattagagactcaggaggcagctcaggaagagtcagggtggaaacttgtccatggagatgttttcaggcctccttcaaactcggatttactctgtgtatatgtggaactggtgttcagttttttgggatgattcttgtcaccatgatttttgctgcacttggattcctctccccctcaaatagaggggggttgatgactgccatgctcttgctctgggtccttatggga

SEQ ID NO: 84406 - DNA, 261 bp, Glycine max
  Clone ID: 700955427H1
atcatacacatatactaaactgaacgaagttgtctaagaagagaagaacaatggctgctggcatgggcttccgcagtcacaaatctttgttaacaattcttttcggttttcttggattgttctcctttacagttgagcagccacaaaaaaataccaatttgatattcaagtaaagaatgtgagtagattatgtcatgcaaaacccattgtaacagtaaatgggaggtttccagggccaacaatttatgttagagaaggaga

SEQ ID NO: 84407 - DNA, 263 bp, Glycine max
  Clone ID: 700955428H1
gcgcaagtgaggaacaagcaagtgcttctaaaggactatgttaccggttttcccaaagaatccgacatgaatattgtcgaaagtaccataacattgaagcttccacaaggttccaatgatgtcttgctcaaaaattgtacttgtcttgtgatccgtatatgaggaatctcatgaacaagcccgaaggccctcccaatagtcgtgcttacactcctggctctccattaataggatatggtgtgtctaaagtcctggcatctggg

SEQ ID NO: 84408 - DNA, 261 bp, Glycine max
  Clone ID: 700955429H1
gcctttctgactcggcctggcccggtcgccctacgcgactggcgcttcaaaaggtagttgacttgcttactcgttagagtaggggtcgcgagagagcagagcgtaccgccctgccatagtcgcgagtctgtttaagtcgcgactgttgtcatagtcaacaaggttgaaacttccaggaaaaaacttcgaattgggagggcgatcctcccggtgaactgaccgtaccccaaaccgacacaggtgaacaagtagagtatacta

SEQ ID NO: 84409 - DNA, 263 bp, Glycine max
  Clone ID: 700955430H1
acctcccttaatttcaccttcaatttcttattagtatatattttaaactttgctagattgtttcctaaacacacaacactctcttattttcccctctgcttgtagaaagcagaagggcgaaatatttcgttaattagttaattatttccctttcgttctccaaagtccataacctctctctccacataacacgatggctgaaaattctatgatcattagcattgaccaaaaagcaatggttacccctcatgaagaacctaatt

SEQ ID NO: 84410 - DNA, 266 bp, Glycine max
  Clone ID: 700955432H1
caaggggtgttttgaaaagatggagcagaaagaaaatcatgctagaaggaaaaagggagggctcatcacaatgcccttcatctttggtaatgaggtttgtgagaagctggctgtggtaggtttcaacacaaacatgttagctacttgacaacacagcttcacatgccattgaccaaagcagctaacaccctcactaactttggtggaactgcaagcttgacaccattgcttggtgctttcattgctgattcttatgccggaaagtt

SEQ ID NO: 84411 - DNA, 269 bp, Glycine max
  Clone ID: 700955433H1
gtttgatctaaaaccataaacctctgtctcgttagatctccttcttccgttctctaaacctctcctccgatccgatctgatccaaaatggcgacgatgacgagcttgattggtctcatcaataagatccaacgagcctgcaccgttttgggagatcacggtggcgagggcttgtcgctctgggaggctcttccctctgtcgccgtcgtcggtggacagagttcagggaaatcgtcggtgctagaaagtgttgtcgggagagattttctc

SEQ ID NO: 84412 - DNA, 264 bp, Glycine max
  Clone ID: 700955434H1
gttaaggttacgcaagagtccattcacgttgttgtgcttggcttttcctctgcgattatatctgagaaagatatcagggaagagttcgtgtgcaaaacgaaacgagggcaagaggtgtatgtgagcaggtctcacagcggcatgtgataaaggtcgggaccatgatacggtttttagtcaagagttttgatgaagaaatacttcatgtttatggatctctggttcctgatcacacaggcagcatttattggttggataagaatt

SEQ ID NO: 84413 - DNA, 264 bp, Glycine max
  Clone ID: 700955435H1
ctcattaattgcaagaatggcacttcgttgcttggtgatgtccctttctgttctcttcactcttggtcttgcgagagaaagccatgccagagacgaagatttttggcatgctgtttggccaaacactcccattccagttcattgcgagatcttctaaagcctggccctgcaagtgttgaaatcgatgatcaccctatgcaaattgaagaaacacagtacccgaaaaccttcttctataaagaagaccttcatccaggcaaaaca

SEQ ID NO: 84414 - DNA, 262 bp, Glycine max
  Clone ID: 700955436H1
tacaagcattcttgacaacaacaagtctgattttgagagagtgataagtgttaacttggttggtccttttctgggaacaaagcatgctgcaagggtcatgattcctgctaaaaagggatgcataatcaacacagtagtgttgctggatgcataggtggaggtgctacacatgcctacacaagttcaaagcacgcactaattggactgacaaaaaacactgcggtggagcttggacaacatggtattagggtaaattgtttgt

SEQ ID NO: 84415 - DNA, 145 bp, Glycine max
  Clone ID: 700955437H1
cattttcatcatctacaaattgttctgagaaaatggtataggaaccggttcatcttacttgcaaaggcagcatcctcagtctcatcaattgatgaactggacacggctacctcagactgggtaaattacgtctaaccatgccgat

SEQ ID NO: 84416 - DNA, 262 bp, Glycine max
  Clone ID: 700955438H1
cgtcgagccgaatcggctcgagaaacctcactctctgattcagtgcctctgatctctctcgctctctctctctctctctctctgtgaaaggactaagatgggttcagtttctctgaaaataggagatggaacagcagattccaaagagcaacactgtgttcttcagctgttaacattctcatgatattctctgtcatcaccaccaacctctttgctctctatgccttcaccgcttccccaaatcaaccccaacactctctcc

SEQ ID NO: 84417 - DNA, 260 bp, Glycine max
  Clone ID: 700955440H1
gcacgaagcacactatgggttggaaaggaggtctcaaaaacgtggtcacaatgtttactttcatggtggccttggttgttgttcaacatgtgaagtgtggggactcagctcgcatgttacttcagcacggtggctcgttcaacgaagtggcaccaacttcgttctgagtaacaggcatttctacttcaacggattcaacgcgtactggttaatgtacatggcatctgacccagccacaaggcccaaggtcactgccgttt

SEQ ID NO: 84418 - DNA, 249 bp, Glycine max
  Clone ID: 700955443H1
ctcttttttctctctcttgcaaaacctaattttcatttcttccctcaaatttcaaaatgcgtgagatccttcacatccagggtggccaatgcggcaaccagatcggcgccaagttctgggaggtggtttgcgcgagcacgggatcgaccctaccggaaggtacggtggggactcggagttgcagctcgagacgatccatgtctactacaaagaggccagttgcggacggttcatgcgcacgcagtactc

SEQ ID NO: 84419 - DNA, 261 bp, Glycine max
  Clone ID: 700955445H1
gtgaacacatgcaatgatcagcagagttgtaagttgctatagttggtctactattttttttcccaatagctttctgtaggagtaaacaactataacccttgatttaatttctggatatgcttggcttcttctgagatgcatttcggggaatatacaaaaatagacccaaggatggggaatatactttgccattgatccatgtttatggattctccaaagcacgagatccagaatttgattttcacgagagaataagaattg

SEQ ID NO: 84420 - DNA, 264 bp, Glycine max
  Clone ID: 700955446H1
aaattttctctctttcacttatttattgactccccaaaagcttttcaaatatctctgttcctctctcacgtaccttctccctatctttcactccacttcttaacaccacaaaacagaacaacggccgagcaaaaacaagaaaaatggtgttgttgtccaaagcaacaacagaacaatactcctacattaagaactgcatgccaaccaaattttcctcaacaattcccatagtgaacctctccaaacctgatgcaaagaccctta

SEQ ID NO: 84421 - DNA, 263 bp, Glycine max
  Clone ID: 700955447H1
ccttgttcttctttctctattgtctatagtcatctccattgttctcttcattacccacacacacaaaagaaacaacactccaagaggaccaccaggtcctccacctcttcctctcatcggcaaccttcaccaacccacaactcatccccacatctctgcctatggcaactcgccaaactccacggtcctctcatgtcgtttcgcctcggcgccgtgcaaaccgtcgtggtttcatcggccagaatcgccgaacaaatcttgaa

SEQ ID NO: 84422 - DNA, 264 bp, Glycine max
  Clone ID: 700955448H1
gtgcctgttgctgtgaactgcaagcagaacatgttctttggaaccaccgttcgtggcgtcaagttctgggacccttacttcttcttcatgaaccctaggcctgtgtacgaggttaccttccttgatcctttgccgaggagatgtcggttaaggctggggggaagtcgtccattgaggtggccaaccacgtgcagaaggtgctgggggatgtgttagggtttgagtgcaccgggttgactaggaaggataagtatatgttgttgg

SEQ ID NO: 84423 - DNA, 264 bp, Glycine max
  Clone ID: 700955449H1
ctctctctcacaataaccactaattctcccaactcaatttttctctcaaccggcccaatttagcataagcccagcatggccaccgcaacagcagcagccacctcgtccttcatggggacgcgcctcctggaggcccatccggggcggggcgggtgcaggcccggttcgggtttggcaagacgaaagccgccgccccgaagacagtttccagggggtcgggctctagctccgataggcccctgtggtatccgggcgccaaggcgc

SEQ ID NO: 84424 - DNA, 263 bp, Glycine max
  Clone ID: 700955450H1
ccgagaaccgccactacgcccacgtcgactgccccggccacgccgactacgtcaagaacatgatcaccggcgctgcccagatggacggcgccatcctcgtcgtctccggcgccgacggcccaatgccccaaaccaagaacacattcttttggccaaacaagtcggcgttcccaacattgtcgtcttcctcaacaaacaggaccaggttgatgacgcggagcttcttcagttagtagaattggaggtccgggagcttctttcca

SEQ ID NO: 84425 - DNA, 261 bp, Glycine max
  Clone ID: 700955451H1
gagatatagaggagactgctacaagacactcagaacttcaattgttgcacgagtctctgacgagagattcagaacagaaactccaagaagctatagaaaaattcaacaacaaggattctgaggttcagtccctgttgagaaaattaagattttggaggaacagatagcaaaggctggggaacagtctacatccttgaagaatgaatttgaagagagtttgagcaaactgacttcattggaaagtgaaaatgaagatttgaa

SEQ ID NO: 84426 - DNA, 263 bp, Glycine max
  Clone ID: 700955452H1
atcttcgtgaaaaccctaaccggcaaaacgattacgctagaggtagagtcctctgacacaatcgataacgtgaaagcgaagatccaggataaggaaggtattccaccggatcagcaacgtcttatcttcgccggaaagcagttaggaagacggcagaaccctcgccgattacaatattcaaaaggaatcgacgcttcatctggtgcttcgtctccgcggagggatgcagatcttcgtgaagacgctcaccggaaaaacgatta

SEQ ID NO: 84427 - DNA, 261 bp, Glycine max
  Clone ID: 700955453H1
gagaaaggagagggtccagtggtgttgttcctccacggcttccctgagctctggtactcatggcgccatcagattctctctctcagctccctcggctaccgcgccgtcgctcccgatctccgtggctacggtgacaccaaagcaccaccttcaatcagcagctacaactgcttccacatagtgggtgatctcgttgcgcttattgactctctgggtgtccaacaagtgttccttgtggctcatgactggggagccatcata

SEQ ID NO: 84428 - DNA, 261 bp, Glycine max
  Clone ID: 700955454H1
attgaaaatgtcactcacattgttactaagactactaaaagctataaaagactaaagaaaataagataaaattctgatttcattcattggtccatcaagagggtgcaaagcttacattaaataataaccctaagaatgataaccctccacttgtcatcatctagtattttaggaaattaaaataaaaactactattaaaaggataatacctaagtcatctaatatttaaactacctatttgggcctctctaagcccatcct

SEQ ID NO: 84429 - DNA, 261 bp, Glycine max
  Clone ID: 700955455H1
tcctgatatcagaaaaagaaaaaagaaaaaaatgtctctagtgactgcagagatcaaagccaaagcagaggtgtatcatggagatgaactctgccaagagaagtcaaagttgctgctaaaggaggtagggctactaatgggcttttgccattgaaggacattgaggaatgtgggtatgagagggatagtgggtttgtgtggctgaagcagaagaagagcacaaaccacaagtttgagaagattgggaagctggtttcctat

SEQ ID NO: 84430 - DNA, 145 bp, Glycine max
  Clone ID: 700955456H1
gcaaaccagaatgggaactgccctaccctctttactttaattcagtcacaacaagggcagaaaaaaaaagaaggcaaaaaaagaatgagcaagtcttctggtgctgtttttctcgcgcgcgctaagcgtgcgatgtttggtttcc

SEQ ID NO: 84431 - DNA, 260 bp, Glycine max
  Clone ID: 700955457H1
tctatttctcagtctctgtgtttgcggctgaggattccgaacgagtgaccttcttcgtttctcgcaaagtttaagtaatcatgggtaaggaaaaggttcacatcaacattgtcgtcattggacatgtcgactcgggaagtcaactaccactggtcacttgatctacaagcttggaggtattgacaagcgtgtgattgagaggttcgagaaggaggctgccgagatgaacaagaggtcattcaagtatgcctgggtgctcg

SEQ ID NO: 84432 - DNA, 261 bp, Glycine max
  Clone ID: 700955458H1
caacatcgccaccggtctcctcttcggcctccccatgccggtccagcccatgaagtccatcgccgccgtcgccatctccgcagttctccccctcaccatcccccaaatctcggccgctggcctctccgtcgccgcgtgctcctcctcctcggtgccaccggcctcatgtccgtcctctaccgctacctccccctccccgtcgtccgcggcgtccaactctcccaaggcctctccttcgccttctccgccgtcaaatacatt

SEQ ID NO: 84433 - DNA, 260 bp, Glycine max
  Clone ID: 700955459H1
cggctcgaggagaagttgaagcagttagacaagagttacaagaagagcgagaacatgctcaacgacttaaggagaattttcatagagatgttatattttctgaatccagagctacctttgctgaggcaaaactcagtgatctttataggaaaatcagaatgtcagattataaggtctgttctatatgcctttccaatgacagggacttggcctttggatgtgggcacatgacttgtagagactgtggatcgaagttatca

SEQ ID NO: 84434 - DNA, 261 bp, Glycine max
  Clone ID: 700955460H1
atctcaatgagaagtatattgtagggtatggtgcctctagtactgtgtacaagtgtgttttaaagaattcccggccaattgcaattaaacgactatacaaccagcatccacacagctcaagggagtttgagaagaacttgaaactattggcagtatcagacacaggaatcttgtcactttgcatggttatgctctaactcctaatggaaatcttcttttctatgactatatggagaatggctctctgtgggatcttcttca

SEQ ID NO: 84435 - DNA, 261 bp, Glycine max
  Clone ID: 700955461H1
ctaagtttccttctcgctcccgtctctgaaatttcgagggtttcatcgttgctgaatcaacaattcggaaccagttagcaatgttcagattctggggatcacaagagcaacaatcacaggatggttcttcgcatcacagtcgtggtatccgccgtcggtggtgagttcaccaacttcgtcgaggcctgttacaccgactgcatcttcttcttcattatcacagaggccttcgtctcatgttccaccttctgaagctgctgc

SEQ ID NO: 84436 - DNA, 259 bp, Glycine max
  Clone ID: 700955463H1
ctccccaatcgcaaaattcaatcgcttcttcttcagcttacactacaggatcgcctctttcaaatcaatatccattcacaatttattagaatatcctttttcaataattccgcgatccacacttccccaaagtcacgccctacgattctttctgaattgaattatttatccacgttttattttttcttagattgagcgttacgaaatcgagattgaatttatgagagggaatagaagaagaataattagggaggatgca

SEQ ID NO: 84437 - DNA, 266 bp, Glycine max
  Clone ID: 700955464H1
aggcagatgatgaaaaatctcagtgtaagtatgctggtaactgccaaggtttgctgaatctgtattcgctcaagtatcgacgcaacaggtgacttcaattcatcttagatgacagaaacaatggcaatgcaaggtgttattgtcacgtctatacgaagttggcaactcaaagaagaacactggacaatcttagtttttcaggctcaatttcggttaaaaaattgtcaaagaatgaaaggaccacagggaacaatcaatttcatagg

SEQ ID NO: 84438 - DNA, 265 bp, Glycine max
  Clone ID: 700955465H1
atttatagtttactattgaaagatgggtttgaaaatggcaatactgatcctaggcctgctggccatgttccttttggtctcctcagaggtggcatccacgaattcaaaagaggtgacaaatggagttgaagatgcaaatatcctggtggaggctatggtgggggttacccaggcaatggcggtggtggctatcctggccgtggtggtggctaccctggtcgtggtggtggctatccaggtcgcggtggtggttaccctggtcgtg

SEQ ID NO: 84439 - DNA, 262 bp, Glycine max
  Clone ID: 700955468H1
agaggagaagagaaagttagagagagaaaaaagaaaagaaggaatcaggttagagaaaaggaggagaaaaagtaagaagaggaagaagaaagggctacggtgccaagacccaatgcccaaaaatcatttccacggttaccagagtttgtaggccaaagaagagaaggtgcaaaaagctgctgatgaactcgcttagcgaggcagattggctaagcgagtctcattcgcttagcgaggcagccagctcgcttagcggatggga

SEQ ID NO: 84440 - DNA, 259 bp, Glycine max
  Clone ID: 700955469H1
atcctccatggttcttatgaagatgaaggagattgcggaggcgtatctaggttccaccataaagaatgcggttgtcactgtgcctgcttacttcaacgactcacaacgtcaagccaccaaggacgctggtgtctttctgggctcaacgtgatgcgaattatcaacgagcctaccgcggctgccattgcttatgggctcgacaaaaaggccactagctctggggagaagaatgttctcatttttgatctcggtggtggga

SEQ ID NO: 84441 - DNA, 260 bp, Glycine max
  Clone ID: 700955470H1
tggaattgtcatcgcccttgaagagcaaagagattgaaccattttcgagggttgatcttgagggtgaagcccccacggtgcttactccgacccagtttgcgacattgtggcctcttgcttcgcttaatgggtcgaatgctaacttgttggggtttgagaaactcttacattctgtgttgggggctaaggctgagaagaaaggttcctttaggttgttgaaggctgatgtttctgctcagacttacgtgaagatgggtttt

SEQ ID NO: 84442 - DNA, 279 bp, Glycine max
  Clone ID: 700955471H1
gtccatctgataaccctttcctgattctctttcgtggttgttgctattctgagtgatgggtatgccctgccgctgttcccacacctcccacatcactgaaatcatcatcaccagctgtcttccgccacaagtactagatcaacaattatccgatcaattcattaccacaaaccaccttcaagagacctttgtccaaatgagcccacttaaagatcgaaacttgagtcggacgtaaacatgcgcgaggtacgtggaagtagccttattccaacatcacta

SEQ ID NO: 84443 - DNA, 260 bp, Glycine max
  unsure (1)..(260): unsure at all n locations
  Clone ID: 700955472H1
gcgcctcatgatgtatcagcagggctgcttcgccggcggcaccgtactccgcctcgcgaagganctcgccgagaacaacaagggtgcgagggtgctcgttgtctgctccgagataaccgccgtgacgttccgcgcccctcggacacgcacctcgactcgctcgtgggacaggcactgttcggagatggcgccgcagcgttgatcatcggatcagaccccgacccagcagtggagcggccgatattcgagatgatatcggc

SEQ ID NO: 84444 - DNA, 261 bp, Glycine max
  Clone ID: 700955473H1
ggttgattggtcccattgattccgaagagaaaagaaaagatgtttgagccacaacagctatacactcgcgcgaagaccgaggaattcgacctcgaatcaggagaaaccctctacccagggctgagcgtcggcggaaccagctccgatggggtttcatccgcaaggtctacggcatcctctccgcgcagatcgtcctcaccaccctcgtctccgtcaccaccgttttctatactccaatcaatgacctcctcaagggcaatt

SEQ ID NO: 84445 - DNA, 262 bp, Glycine max
  Clone ID: 700955475H1
cacctctaaagaaggatatagttttgaagagatatgcatcaagaaagaagcgtttgagggagaagagaagttttgtgcaaaatccttgggaacagtaattggttttgccatttcaaagctgggaaagaacattcaagtactttcaagttcctttgtcaataagcaagagcaatacactgtggaaggagtgcagaatcttggagacaaagcagtgatgtgtcatgggctaaatttcagaactgcagtattttactgccataaa

SEQ ID NO: 84446 - DNA, 260 bp, Glycine max
  Clone ID: 700955476H1
cctcctcttgttaaccttgttctgtttctctcttcccccttctctccgtctctctctcactcaatattttgaggtaatttgcaatggctgaaccttccaaggtcattcacgttcgaaatgtggggcatgagtatctgaaaatgatttgcttcaactatttcagccttttggagtaataacaaagcttgtgatgttgcgtgccaaaaatcaggctcttcttcaaatgcaagatattccttctgcagttaatgctttacaat

SEQ ID NO: 84447 - DNA, 258 bp, Glycine max
  Clone ID: 700955478H1
gaaagataaagcattccatagcctcccataaaaatgaagaatactatcttctctgctctctttctactttgtgccttcaccacctcatacctaccttcaaccaccgcggtggtcgataccgacggtgatattttcagaatcctggcacatactttatcttgtccgtttttcgacccggcggcggagtagaattcgccgccactggaaacgaaattgccctctcactgtcgtgcagactctcttcgggaggggctttcc

SEQ ID NO: 84448 - DNA, 264 bp, Glycine max
  Clone ID: 700955480H1
gcaaaaaaaatatggcatacatcgccaccacggttggtgcaagcagtgtcaccacagtggattgccagaaacaagtgagatcatggaggctcctacgttccctggtggaacttctaatccccacttgcaactgaccttcgtagaagaagaagaaaaccaatcaccacaaaagtgtctccaaaatcatccacaacaacaacaactcatgatgacaacttcaaccacaatcactggcaccatctttggataccgcaaaggaaaggt

SEQ ID NO: 84449 - DNA, 279 bp, Glycine max
  unsure (1)..(279): unsure at all n locations
  Clone ID: 700955481H1
atccgcagctgcttttattcgcaccgcaaacagtgagccatggccgtcggaaagaacaagcgcatctccaaggggaagaagggtggcaagaagaaggcagctgatccctttgccaagaaggattggtatgacattaaggctccttctgtttattcaagttgaaaaatgcttggcaaatacccacgtacactgcgtactcaggggtaccaagattgacttcgtgaagggactcatagcatagagtgtnttgagggtctccttgagctgatcttcaagggg

SEQ ID NO: 84450 - DNA, 256 bp, Glycine max
  Clone ID: 700955482H1
ctctcacacactcaaccaaagacgaaggaagaagaagaattacaaagtaccaccaaacaggctgcgacgacgtcgttctttgcaacttccagttcttgttcttgatgaatatgacaccagtttgccctttgtcaaagctgctcgccccgatgataacaatgcctctaagaaatctggcgaaaactctatgaaacatcaggctgagtctgagagtaaggtgaagaaagaggttaatgactcagctagtacctcacca

SEQ ID NO: 84451 - DNA, 260 bp, Glycine max
  Clone ID: 700955483H1
gaggaactttgcaacaagcatggagacagcctcagactatggagcattcacagagaaattcactttaccaccaaattctgcaccagctcttcctctcaaatcactcacctttgcagtgaaagagatgtatgtcttcacttttctttttgtaccacaatattctgattgtcaaaaactctcctttgctgacatcaaagtcgtcaactagtctttgaatccatgcttctgcatcttgaacttgttttggaagtgtttgtgtc

SEQ ID NO: 84452 - DNA, 260 bp, Glycine max
  Clone ID: 700955484H1
ataatctccaactccaaaacaaaacctttttacacgacacatgtgtatgtgcaagataaattctctttcagtttgaggtgcaaatccaacttggtcatcactggttccgagtgatcttgcttcagatcaggtttttgctgagaacaactcagattttcagtacactgctactgccaagcagaagttaaattagtgtggataatgattgccacgcttgaagactagaagcaataattcagcagtgtttgtgtcaagatcct

SEQ ID NO: 84453 - DNA, 259 bp, Glycine max
  Clone ID: 700955485H1
cttttctcttctttcttcttcttccatctctttttttctgcttaaggtctacaaaagttctcttcttcttctcctcctattgaactttggtcatcacacgagaaaacccacgtctggatcttctggtgtaaggccattagaagccttttagaaattttcaaattgagttggtgtatagtgttgaagggggtgaaatttggagcccagtttgttacttcatttgaacggtcatagtttgaaccctctttttctggagatt

SEQ ID NO: 84454 - DNA, 261 bp, Glycine max
  Clone ID: 700955486H1
caacaacaaaagcttatactacaaaggagtaaacggttgtttctttgtgaccaagcttcactccatcaacatcaagtgatggccctcaacacctcttgctccaaggccattgttgacatgctaggaactcatgttcctaaatgtgctattgatgtttccaacacacccagattttccttgtcccagaatgacaaaaagggctgcaacttgggattccccaaacttgttcaaaacaagggccttttcccacttcatgctgtg

SEQ ID NO: 84455 - DNA, 260 bp, Glycine max
  Clone ID: 700955488H1
attcaatactacaacttctgaatcacttagttgaattgaattatcttcaaaatgagagaaatccttcatgttcaagctggtcaatgtggcaaccaaattggaggcaagttttgggaggtgatgtgtgatgaaatgggattgatgccactggaaattacgtaggcaattcccatcttcaacttgagagggttaacgtgtactacaatgaagcaagtggaggacgctatgttcctcgagctgtgcttatggaccttgaacca

SEQ ID NO: 84456 - DNA, 260 bp, Glycine max
  Clone ID: 700955491H1
gttcattaaacttgttttttgctagaagcaggaagagaagcgaaacaaacaaacaacaaaataatcaattgagccacttaccatcagatttagatctcccaacagagagtttctcaaaattgccaagtaccctttcaggatcaaggaagagaatcaagaaccaccaaaaggtgttgttctttgttgtagttgtttgtaactgtagcaacatgaagatggttagaaagttggttgtggtgaggcttgtgttggccatatct

SEQ ID NO: 84457 - DNA, 258 bp, Glycine max
  Clone ID: 700955492H1
gtggcctgcaagattttttgagggagcaagagcctgaatttgtaacaagccttgttcgtacccggattttgccactgtatgcaatagctgtgtccctaccatacctagttgctagtgcaaactgggtacttgagaactaggctcctgtctaccagaagagatgagtactgatgaatatcctcaatggcccatggctttggccatgccgattaggcagggccctcctggcaaccctgaggggttctctggctcggggga

SEQ ID NO: 84458 - DNA, 250 bp, Glycine max
  Clone ID: 700955493H1
gtttctttctgtgttgttcacttgtttggtctctttctttcaaccttaacccttccaaaccaacacatataaaaatcaaccctctcttcttcttctctctccgcgggttgagttgaacttcaagaacctcaaaaaccctttctctctctctctctctagatctgttcaaatccgaaaccatttccgctctaatttccaagagcaaaccctaatccgctctctctgtatgatactagatttcccctcctca

SEQ ID NO: 84459 - DNA, 260 bp, Glycine max
  Clone ID: 700955494H1
ttttgatatctccaccatcctacgtcttcccttctcttctcaccttgttcttgcctttatcaccaggaggacagaaagggaacaataaatcgaataaaaagcaccccatatccaagataggagctttctttcctgtttattctgagtcacgcataccgtgattctcctattagatcggcctttttccatttccatttcattcgggggtcgcaaatttctgggactaatcaattgacaatgctgcattagtgggattggta

SEQ ID NO: 84460 - DNA, 257 bp, Glycine max
  Clone ID: 700955495H1
aaagaactggacacccatttaggaaaagaaagatgggtccaagaatctgacatagaaaacctcacttatctacaagccattatcaaagagacccttcgtttgtaccctccagcacctttaactgggataaggaagttatggaggattgttgtgtggccgggtaccatgtcccaaagggaacacgtttgcttattaacctatggaacttgcaaagggatccaaaagtttggcccaaccctaataagtttgaacccgag

SEQ ID NO: 84461 - DNA, 273 bp, Glycine max
  Clone ID: 700955501H1
gtgggagatggagaagccacaaaacggagaagaaaaggaagaaaccacggcctctttctgcggttacgattctcttcaccgtcttctcaaggataatcttaacccccatcacttccaggaagtcagccgtttgcttactgggcttaattgtggaaaagcacttgaagcagtttctctcccagaatctgcaacttccctctctgcggaacatggttttgacatccaggccttttccttttgtgctgacaaggaactattaagagaacctcggat

SEQ ID NO: 84462 - DNA, 241 bp, Glycine max
  Clone ID: 700955502H1
gttctcctgttgttgttgtagcgctgattgaggtagcgctgattcgatcgcatcagaacattcattcacattcatatcctctctctccgatcccaatggcggatgagagccccaaaccagagaccttcgaactcaacaatggaagcatgcaggtcctcctcaccaatctcggctgcaccatcatctccttatccgtacctggacaagatggtgtgttatctgacgttgttctgggccttaa

SEQ ID NO: 84463 - DNA, 261 bp, Glycine max
  Clone ID: 700955503H1
tctgcttctaaatctgaactcaacggttctgtgaaatcaaaatccgcggcagttcagcattctagggtgatattttcatggatggagatggtagcagtgaaagcccaatcgaaactaagaaagccaagtcaaaaacccctcgaaaacctaaagaaaccattctgaagcaaaaatcccctgccgaattcttcgcagaaaataagaacattgcaggatttgataaccctggaaaatctctttatactactgttagagagcttg

SEQ ID NO: 84464 - DNA, 259 bp, Glycine max
  Clone ID: 700955504H1
attgtatccaaccaccaaagaatctcgtgtctgaaacattccccgtagcggcggcgctgtctcttttgcagccgctactacgtttcctttttccccgcccaaagcaacaagtttagttatttgtgtctccaatatgatccatcgtgattaaacacatacatccatggataataacaacaacaactactccgggtttgttcccaataatgatactgatgatgactgtacatttctccaaaccttgttggaattggacccc

SEQ ID NO: 84465 - DNA, 258 bp, Glycine max
  Clone ID: 700955505H1
tttctctaatccaaatatctctccgttaatgctctcaccacaaacttcaatagactagccaaaagctaacaccaactataggccaaatcaccaataaatattatttcccgttcttttggcgtgttggccacccactgaacacatttgcactcacacatagaagcagagagaggccattggttggtttcagagatgggaagcatgcacatagaaaccccagaaacttttgctgatggtagcaaaaacttcgatgatgat

SEQ ID NO: 84466 - DNA, 124 bp, Glycine max
  Clone ID: 700955507H1
cggataattgtgttggaagatacaaaagagtacattagttatgtctcaaaggaagaggctaaaactcaagatagaagaccttttgatcttttggtatgtttagatgtggcgacaaggagattat

SEQ ID NO: 84467 - DNA, 248 bp, Glycine max
  Clone ID: 700955508H1
aaggcagagaagagaaggagagaggcttgtacctggagagaaaagaggagacaataatacatggggaagcagggtctaaacacggtggagcaacaatctgtggcaccgacagcatccaagtttccgttgagcttttgggaagccacggtggcttcaacggtggcgctggtttttgcggtgggtcttctcggcgtgtacctcaccatgcccgattccgattacagttccttaaatccctcgtaccctcg

SEQ ID NO: 84468 - DNA, 250 bp, Glycine max; identical to SEQ ID NO: 72146
  Clone ID: 700955510H1

SEQ ID NO: 84469 - DNA, 249 bp, Glycine max
  Clone ID: 700955511H1
tctgtctattgcacaatggatgcagatgcagctcctttgcacatagcaatgtatccatggtttgctatggggcacctcaccccatttctccaccttgccaacaagttagccaaaaggggacacaaaatctccttcttcatacccagaagaacacaagccaagttagaagacctcaatcttcacccaaacctcatcacctttgtccccatcaatgttcctcacgttgatggtcttccttatgatgcagaa

SEQ ID NO: 84470 - DNA, 249 bp, Glycine max
  Clone ID: 700955512H1
tctgtctctgtgtttgcggctgaggattccgaacgagcgaccttcttcgtttctcgcaaagtttaagtcatcatgggtaaggaaaagactcacatcaacattgtcgtcattggacatgtcgactctgggaagtcaactaccactggtcatttgatctacaagcttggaggtattgacaagcgtgtgattgagaggttcgagaaggaggctgctgagatgaacaagaggtcattcaagtatgcctgggtg

SEQ ID NO: 84471 - DNA, 85 bp, Glycine max
  Clone ID: 700955513H1
ggagattagagtgtgaagtccaaactctgaaaccctcaactcaaatccaatcctttggttggtttcgaattcgactccaaccaaa

SEQ ID NO: 84472 - DNA, 248 bp, Glycine max
  Clone ID: 700955514H1
cgttttcttcttctgctatctatctatctagggctcaattccgattccgattccgattcatactcataaccctttcaatgctttattgaactaacgaggttttcttcacgcaccttgttttctctgcattgtttcgaattccatggaggagtcttcgtacaccggtcttcccactagccacttgctcggttcagttcctgctgtcataactgaagaaaataatgccacgaaacatgtggccaccggtg

SEQ ID NO: 84473 - DNA, 248 bp, Glycine max
  Clone ID: 700955515H1
ggcggggataagattaaagattcaacaatggcctctgcttctgctactcttctcaagtcatctcctgttcttgacaagtgcgagtgggtcaaaggccagacccttcgccaacctctcgtgagatgtaacccttcctcagcatcagctctcaccatcaaagctgcttcctatgctgacgagctcgtcaaaaccgccaaaacagtggcctcaccggggcgtgtttttttggcaatggataactcaccccc

SEQ ID NO: 84474 - DNA, 81 bp, Glycine max
  Clone ID: 700955516H1
attgaacccaaaaagagagaactttttttcttggtttgtgttttcattttgttgtggttttctaaagcgaagtgaaaaatt

SEQ ID NO: 84475 - DNA, 216 bp, Glycine max
  Clone ID: 700955517H1
gtttgggtgacaacaaacctacttacatggaacctgttcaaccaggtggtctttttggactcattaccaaagaattcttgcctccagcagaggctccgcttccacccttgacagaatctgaagtggcagagtcacctttgcctcctgttgctaaaatagccccagcttccagcccgaatgccagaaccaaatttccacagggaaattcacagccta

SEQ ID NO: 84476 - DNA, 255 bp, Glycine max
  Clone ID: 700955519H1
gtgatgtccgtcccggtggatttggctatggtgtaaaggcaaccaggttgcgtaactacgtgatgtcctttgatggtgatacactacaaagatatgcaacaattagatccaaagaggctgtcagcatcatcgagaagcacacagaagcattgtttggaagacctgaaattgttgtaacacctgagggggcagtctctaaggatgagaacatcaaaattagctttggtggtttaaagaagcttgttttagaggctg

SEQ ID NO: 84477 - DNA, 254 bp, Glycine max
  Clone ID: 700955522H1
tggaagttgatagtaggtttctgaacactggcctcctccttgtggccacaatccttgtggtcaagctcatctcagccttcatagtgcccaaatccagaaagagggtacccccaattgtgaaggggtggcccttaattggaggactcatccgtttcctcaaaggtccaatctttatgctccgtgacgagtaccctaagcttggaagtgtcttcactctcaaactcttccacaagaacatcaccttcctcattggc

SEQ ID NO: 84478 - DNA, 253 bp, Glycine max
  Clone ID: 700955524H1
ccagcctcgacctcgccatgagcctccacgtcctcgccgccatctactgcagcctcggacgcttcgcagaagccgtccccgtcctcgaacgcgccatcctggtccccgacgtcgaccgcggccccgatcacgccctcgcctcgttctccggctacatgcagctcggcgacaccttctccatgctcggtcaggttgaccgatccatctcctgctacgaccaaggcctccagatccagatccaagccctcggtga

SEQ ID NO: 84479 - DNA, 249 bp, Glycine max
  Clone ID: 700955526H1
ctttctatcactctgttgagtgagtaagcaaatggaggaatagcgatctgaattttcggattctttaattgcttctctcgctttcaccgtccgaactcaatttatagatactccgtcaacctcaatcccaactaactacctctcttcttcctttttgttggttggttggttgaataaagagagaaaatcgtttttgttgcttcttatttaacaggttccttttcgcagcttcaccatatctccgaaatg

SEQ ID NO: 84480 - DNA, 248 bp, Glycine max
  Clone ID: 700955527H1
aaattcgcaaaactgcaaactctaatcctccgtcaagacaagcctcaactagaggataatgctgttgagactattgcaaaatgctgtcatgaactgcagatcctggacctcagcaaaagtttcaagctaactgatcgttcactctatgagctcgcccttggttgtcgcgatcttacaaaacttcgcatcagcgggtgttcagcatttagtgacaatgctctggcttaccttgccagcttctgcagaaa

SEQ ID NO: 84481 - DNA, 247 bp, Glycine max
  Clone ID: 700955528H1
ctgggcttcttggtgatggctttggttccacgccagaaatgtgcaaaaagaacttgatatgggtggttactcggatgcaggttgtggtggaacgctatcctacatggggtgacatagttcaagtggacacttgggtttctggatcagggaagaatggtatgcgccgtgattggcttttacgtgactgcaaaactggtgaaatcttgacaagagcttccagtgtttgggtcatgatgaataagctaac

SEQ ID NO: 84482 - DNA, 247 bp, Glycine max
  Clone ID: 700955529H1
cgaatggtgtaggaaacctggcttcatctgtgatcacaggttctgcacttgatttttcaaactggacaaaggtggagaagatactggttgccaaggcaacagatcataactcaagacttcaattaacaaccaccaccaaaggtgtgatatggttggaccaagtgtctgctatgccactggacacatataagggacatggtttccgaactgaccttgttgaaatgctgacagctttgaaaccaagatt

SEQ ID NO: 84483 - DNA, 257 bp, Glycine max
  Clone ID: 700955532H1
acttcactctcaagcttcaaacatgactcctttttacttcctcctatttgccttcatccttttcctctccataaacttcttgatccaaacaagaaggttcaaaaaccttcctccgggaccattttctttccctataatcggaaacctccaccaactcaagcaacccctccaccgcacgttccatgccttctcacaaaaatatggccctattttctccctctggttcggctcccgttttgtcgtcgtcgtttcgtcgc

SEQ ID NO: 84484 - DNA, 78 bp, Glycine max
  Clone ID: 700955534H1
ggcagaggcaggttcttctgcattagagaacaaggggtataggattctcatcattcaaccaaatgaccgtttgaggct

SEQ ID NO: 84485 - DNA, 263 bp, Glycine max
  Clone ID: 700955535H1
gtccgtcacattcattattcctggttccgtttcttcccaccaaacgaacaacgatgacgacggcgtttgagcgtcacgcgcttcctctgtttctgtttctgtttctgactccgattatcaatgcctccattcacgactactccaacgaacccttcactcatcgctccgacgccttcttcttccacggcggcagcgaggccctcttcgccaaatccttcatcaggttcgaaacggtgacgtttgcgcgtcctcgcgagtccgcg

SEQ ID NO: 84486 - DNA, 260 bp, Glycine max
  Clone ID: 700955536H1
ggtggacaatgtcttgatacatgaggtagctgaaacagatgagcacacctttgcaagccactatcccatggagaggcttcaggacgtggagaaagacgaagaaggggaagaaagtccgaatcctgttcctatccccttgtcagatattaatacagcaacaacaaaccctgcagtgtctgaagagcaatcaactatcaagtcctgcatgtatagagatgggaacattcccaagaacaaaagaaaacgcggggagcgcaaag

SEQ ID NO: 84487 - DNA, 255 bp, Glycine max
  Clone ID: 700955537H1
gtctcaactttccttcattttctctcttcctctcaccgagtcacgcactcggcttgactcgtacgaactccgatccccccccgagtcacactcaaccagcaccaccgcccgatccgacgatgtctcgcgcctcctccgccgcagattccgccgcctccggtgagatcatactgttcggagtcagagtcgtcgtcgattccatgaggaagagcgtcacatgagcaacctctcacagtacgagcatcctcaagacgg

SEQ ID NO: 84488 - DNA, 251 bp, Glycine max
  Clone ID: 700955540H1
ctctttctccggcgacgatctcagattccggtcactcctctcgccggcgatcccttattcctccggcctccgtcgagtcctttccgattcgaatcgttcccagccttgtgccaccatgaatcccgaatacgattatttgttcaagcttttgctgattggagattctggtgtaggcaagtcatgtcttctcctgaggtttgctgatgattcataccttgacagctatatcagtaccattggagtggacttta

SEQ ID NO: 84489 - DNA, 247 bp, Glycine max
  Clone ID: 700955542H1
atcgtagcaaagaaagaaagatagaaaaccctagcttaccttttcaactttcaagaacttggggcatgtattgtgtattgtatacagatgcaaatcttcgttaagacactcactggtaagacaatcacccttgaggtggagagttcagataccatagataatgtaaagtccaagattcaagacaaggaagggatcccaccagaccagcaacgtctcatttttgctagcaagcagcttgaggatagac

SEQ ID NO: 84490 - DNA, 247 bp, Glycine max
  Clone ID: 700955543H1
atggaactggagagcgcaaggaatgggataggatctatgattatgatgtctacaatgacttgggcaacccggatagcggtgataaatatgcacgccccgttcttggtggttcagccttaccttaccctcgcagaggaagaaccggaagaggaaaaactagaaaagatcccaacagtgagaagccgagcgattttgtttaccttccaagagatgaagcatttggtcacttgaagtcatcagattttct

SEQ ID NO: 84491 - DNA, 247 bp, Glycine max
  Clone ID: 700955544H1
atccacacaaactcagggtagggcagagagagagagagagagagagagagagagagagaatgggagggtgggctatcgcggtgcatagtggcgctggtgtcgaccctaatctcccactcgagcgacaagaagaagcgaaacaacttctcacgcgctctctcaatctgggaatctctgctctaaattctaatcttcgcgacatagatgtcgtcgaacttgtggtgagggaattggaaacggatccgct

SEQ ID NO: 84492 - DNA, 247 bp, Glycine max
  Clone ID: 700955545H1
cagtactgtatataaggcacgggatgtgattaaccaaaagtttgtagcattgaagaaagtacgctttgacaatctggatcccgagagtgtcaagtttatggcaagggaaatccatgttctgcgtaggcttgaccatccaaacataattaaattggagggcttgattacatcacgaatgtctcgcagcctgtaccttgtttttgagtatatggagcatgatcttacgggacttgcatcaaatcctgat

SEQ ID NO: 84493 - DNA, 247 bp, Glycine max
  Clone ID: 700955547H1
atcagagagaagggcaaagaaagggaaggaaatgttgtaaaacctggtgcacaagttgttgattctgagaccgtcaacaagaagtgtttctctgctgatctagagccagagctgcctggttctctctcaatgaatgttccagacccagatttccatgattttgatggagaccgtactgaaaatgcttttggtgagaaccaggtatgggctgcatatgataatgatgatggcatgccgcgttactatt

SEQ ID NO: 84494 - DNA, 152 bp, Glycine max
  Clone ID: 700955548H1
acgcgtatgtgctctcaatattcggctcgagtaaaaaatggcacctgcaacacagagtctctctctcctcctcctgttctcactctgcatcgccgcaaccgttagatcgagcgacacgtctacgattgtgtgtacacggcctacgttagaac

SEQ ID NO: 84495 - DNA, 236 bp, Glycine max
  Clone ID: 700955549H1
gaacttcgtcctccctctgcttctttctttcttagttgcagcgcgattgctgcatcgtcctccaataagagctcgctgctagtgaaccctaacacggcggcaacgagaggtgttcggttgaagctcagatcagcgatggcagcagcaacccgcacttctctgcggttcctcctctcagtctccgtaaccctaactctcgctcacctcgccgcctcaaattccgaagcgacgctctc

SEQ ID NO: 84496 - DNA, 258 bp, Glycine max
  Clone ID: 700955550H1
tccgcatccgctagctcgcgcaggcaccagcaggtgaggttattgtgatttgaatggagggaagtggaggtggcggtgcttcaccgtctgcaccgttgaagcaatacttacaggaattctcgaagctgtttcagtactatctggataaatccactccccatcccccctacaggtggattgggactttcgtcattgcatccatctacgttttgcgtgttgtttatgtgcaagaggtttacatggtccttagggcctcgg

SEQ ID NO: 84497 - DNA, 258 bp, Glycine max
  Clone ID: 700955551H1
gtctaagagtccagtgtctctatatctatctaccatatatcttccttccaaaatccatcctctgcgagtgagtgtttcgttggagtcagaggcgatgatgtcttcaattagattcctatggatcctggtggtgtgtttgacggcatcatgcgcgctaagccaaccgcagaagctatcagcgtacgatgttctcatggagtacggcttcccggtgggtcttcttccgaagggagccatagggtattcactgaacagaga

SEQ ID NO: 84498 - DNA, 257 bp, Glycine max
  Clone ID: 700955552H1
ggaaaaggcgtcttcataaacgccgcccaaaacttctcatacccttttattcattccattcgtttctagggttttcttttctttgccgagaaaatgagagagtgcatttcgatccacattggccaggccggtatccaggttggaaacgcctgctgggaactctattgccttgaacacggcattcagcccgatcgacagatgccgagtgacaagaccgttggcggaggagacgacgccttcaacacatttttcagcga

SEQ ID NO: 84499 - DNA, 255 bp, Glycine max
  Clone ID: 700955553H1
gcaaaaagaaagaatcccaggcgaggagaaagatggaggggaaggagcaggatgtgtcgttgggagcgaacaagttccccgagagacagccgattgggacggcggcgcagagccaagacgacggcaaggactaccaggagccggcgccggcgccgctggttgacccgacggagtttacgtcatggtcgttttacagagcagggatagcagagtttgtggccacttttctgtttctctacatcaccgtcttaaccg

SEQ ID NO: 84500 - DNA, 252 bp, Glycine max
  Clone ID: 700955554H1
ctgaaacaaagaagtgaaaataacagcaaaaagtaggagctgcagcagctcccccgaagcttatctcagcggcagactctgaaagctgtttgagtagcctcaacccggagaatagcaccaatgggagaggaggaaaacaaaccagaggaacccatggcaaaggagaaaaacccagaggaagaagcaacccaagagaaaaaaccggagcaagagtccaaagaggaagttgctgctgctgctgctgctccgcca

SEQ ID NO: 84501 - DNA, 252 bp, Glycine max
  Clone ID: 700955555H1
cggctcgagcaagacctcaacaacgagaaaactcaagaaacattcaactttcacttataatgtttacaggttcacactcggggttaattaccattgtaactcactctggctcataagtgtgcttcattacgatccgtataacttcgagtccttgtgggtcagggagcattcaagtagcgaggtcctaattattaacccgttttacttttctggaatacaaggcagtttaaccatgcagaccccaaagacaag

SEQ ID NO: 84502 - DNA, 252 bp, Glycine max
  Clone ID: 700955556H1
ctttaattactacttccccgttcgagttcacccactcacccaaacacgccactttccagttatcatcatcatgctttcgttttccactctcagaagatcctcacccttcctcgcccgacgcttctcaacccaacggtcccagatccgccacgcgtcaacctcctcctcctcctcctcctcactccacaacaccgcgaacccggttcgaacctggttcggtcgaaacgcactctcgaccgtcctcgccggcgc

SEQ ID NO: 84503 - DNA, 250 bp, Glycine max
  Clone ID: 700955557H1
gtccgaattgtgaaagtaagcaaagatggctttcacggaatcgtctctcctccttcctatcggtttcaggaaccaacaagaacaagaacaaggttccagaagacaaatggtatttagcctacattgtgtattttaccctgggtctcggttaccttctcccatggaacgctttcatcaccgccgttgattacttctcctttctctaccctgacgccagcgttgaccgcatcttcgccgtggtttacatgat

SEQ ID NO: 84504 - DNA, 246 bp, Glycine max
  Clone ID: 700955560H1
gtcaacgggcgagtaaacccgtaaggcgcaaggaagctgattggtgggatccccctgtgggttgcaccgccgaccgaccctgatcttctgtgaagggttcgagtgagagcatacctgtcgggacccgaaagatggtgaactatgcctgagcggggcgaagccagatgaaactctggtggaggcccgtaacgatactgacgtgcaaatcgttcgtctgacttgggtataggggcgaaacactaatcg

SEQ ID NO: 84505 - DNA, 73 bp, Glycine max
  Clone ID: 700955563H1
aaaaaggtttccagaccacgcaaccctcccactcatccttcctacgaggagatgattaaagacgcaattacct

SEQ ID NO: 84506 - DNA, 261 bp, Glycine max
  Clone ID: 700955565H1
gtaatatttcatgcttctctatcactcttgtcaaattccacaaaaaccaagtactacaagggaagaagaacttagctacaagctaaggaaggatcaaagagaatggctcaagcaatggcatcaatgactagcttacgtggttcctctcaggctgtgttggaaggtagccttggctccacacgcttgaatgtggggagtggaagcagggtggcctcagtcacacgtgcagggttcacagttagagcacagcaacaacaagtg

SEQ ID NO: 84507 - DNA, 260 bp, Glycine max
  Clone ID: 700955566H1
attgctcaatagtttcaactgtagattttggaaaggtggcatttgttgcaattggagctacaatggttggtagcattacttttacaaagaaaaagggcgactatgttaagaagggagatgagtttggatatttctcattcggtggaagcactgtaatttgcgtttttgaagagaattcaattgcaattgatgaagaccttttagcaaatagcgccagatcactggagaccttggtgtctgtagggatgagattgggtgtc

SEQ ID NO: 84508 - DNA, 259 bp, Glycine max
  Clone ID: 700955567H1
ataacacacataataaacatattacaacttcttcttcttcttccattgaccattgttgttgttgttgcttttgttcgttctcgccatgccaatgttgtcttcgagaggcttcatcgcttatctcgtatctgctttctcttgtgctgttctgtctgcgctttttctcaccaaccacatccatcatgatgataacaagccaattactttgttagcctctcgtgtgtctgaaactcttaaagtttggccagacttggagcca

SEQ ID NO: 84509 - DNA, 253 bp, Glycine max
  Clone ID: 700955568H1
attaacactaataacagcaaactaaaggtgaagtttgccagaaacaagatgggaaggaaccattttcagcagcaacactgtgctgatgggagcatgtggatggagagtcagggtcagcaacagagctatgccttccaagaagagtcttggagccctgataacaactatggccacaaccacaagcaattcccaggcatgcacatgaacatgaacaacaacaacaacaacaaaaggcttggtgcttttgctgctg

SEQ ID NO: 84510 - DNA, 250 bp, Glycine max
  Clone ID: 700955569H1
ggcgttagtcaagaatccggtgtgctcctcgatttggcatcccacgtgaaccgcttcgccttcgattccttccgttccgactacaacaacagcaacacccttctctccaatttctcgcaattcaacaacacaagaaccggagaagcggcagtcaaacgcagcgtttcgctggggctgaaggttgggggagcgagtgtgcggtttaggaacattctcaatgacttcaacagagccgttaggtttcactgcg

SEQ ID NO: 84511 - DNA, 250 bp, Glycine max
  Clone ID: 700955572H1
cattaattcacatagtttgtttcttgtcccattaccgatattcaaaagatgggcatccaacatgtgctggttttgccatttcctgctcaagggcatgtcaatcctctgatgctcttgtcaaaaaaaactagctgaacatggcttcaaagtcacttttgtcaacacagatttcaaccacaagagagtgttgagtgcaacaaatgaggagggatcagcagtgagattaatctcaatcccagatggtttaggc

SEQ ID NO: 84512 - DNA, 246 bp, Glycine max
  Clone ID: 700955574H1
ttttgttatctcttcttccacaaactttcggagttttctttcgttaattaataaaatctttgcttaattaatttgtccttcctggaggggcaattaattaattaatctctggtgagtatttataaatatggagagcctggaagaaagagtgtttatgttcatggatgaacaatattatttttccaattccaatgaatcagagctgcatatgcatcatcatccctctgtgtctgtggagaacatatc

SEQ ID NO: 84513 - DNA, 246 bp, Glycine max
  Clone ID: 700955575H1
caaaaggaatcaaccctccatctcgtgcttcgcctcaggggtggcatgcaaatctttgtcaagactttgaccgggaagaccatcacccttgaggtggaatcctcggacaccattgataatgttaaggccaagatccaggacaaagagggcatccccccagatcagcagaggctgattttgcccggtaaacaacttgaggatggaagaacccttgctgattacaacattcagaaggaatccaccctt

SEQ ID NO: 84514 - DNA, 132 bp, Glycine max
  Clone ID: 700954949H1
ggcttcttctacatcacatccatccttttggtccctcctgaacctgtctgcgtccattcccatttgttcttccgtatgcatgttcccaccgtctaagaaacctagcagagcaacaaaacggcgtcatgcttg

SEQ ID NO: 84515 - DNA, 250 bp, Glycine max
  Clone ID: 700954956H1
ggactgaacatccaagaagcacatgcattttctacaactgatggtttctcattagatgtgtttgttgttgaaggatggccctatgaggaaacagaaaagcttaaagcagctttggaaagtgaagtcttgaagaagattgagagacaggtgaggtctagtccacaatccgtatcttcagttgacgagcctgatcaagcaaagttgtacagtgaactggatcatgtgacaataccaaatgatgggacagatg

SEQ ID NO: 84516 - DNA, 251 bp, Glycine max
  Clone ID: 700954957H1
tggaagccctcactcttccctcttttctttctttcatccccaaatcaaaacctaaattcccaccttcaactttctcccccaaatcgaccaccaccactgtcaagcccattcatttatattttattcgtatatatacatacagagagtgagtgagagagagagtgggtagaatggattcggatcaagcaagcttttcatcggtgggatttcatgggatacgacggatgacaagctcaaggagcatttcggta

SEQ ID NO: 84517 - DNA, 251 bp, Glycine max
  Clone ID: 700954958H1
aagaaaatgggtagaggagaagatcgagaaggggtcgcagcagccgggggctttttctggtcctacaccgacgaaccccatgccacacgacgtcgtctgatcctctccaaataccctcaaatcaaacaactctttggccccgaccactccgcttttttcaagattagtggagttgttttgcttcagcttggtactggtgctttactccatgatgctggctggctgaagatttttttagtagcatacttttt

SEQ ID NO: 84518 - DNA, 126 bp, Glycine max
  Clone ID: 700954963H1
tgacaagcgagctgatgatagacttatccacactaggtggtatcaccttgaagaatccatatcatctgtgctggatggggaacaaggaaaaaaggagaaagataaattttttagtagaattcacct

SEQ ID NO: 84519 - DNA, 241 bp, Glycine max
  Clone ID: 700954964H1
acgtaagcttatgtctattttagggtgatgtttagtaattgtgtttgtttgagtaatattgtatttagggtaagatttagtaatatgggtgatgttcagaatgctaattaataaataagctctttagcaaactactagcttgtgattgcagttgacagggaattgtttcttctcccttcagctgttttaagttctattctatatttgagcattgtagtatttgcactgtgttattggtgtc

SEQ ID NO: 84520 - DNA, 250 bp, Glycine max
  Clone ID: 700954965H1
cttagctcaaacctcacctcaataatctttcgtgctagctagcttaatcatattccaattccaacagaaccaaattctgctagctagctagtacgtcaaaggaaataaaataatatggcattcagcgggacccaacagaaatgcgaggcttgcgacaaaactggtcacttggtcgaaagttatctgtcgatggggctgcttatcacaagaattgcttcagatgcagccattgcaatgggcttcttgcgag

SEQ ID NO: 84521 - DNA, 240 bp, Glycine max
  Clone ID: 700954966H1
tgcagatctcaaacgaagcccttttctctctctcttcaatttcacccttttagcatttgtacattcctttcccttccttgaatcgttcttaattgcgagatgggatatcggagaagttgattggcctcccattaattgcaggtctgaatgatctgatggagtctaaagttgggaagaagaatcgtctagtagtaagtcccttttgtacgaagctcctctcgattacaccattgatgacgt

SEQ ID NO: 84522 - DNA, 248 bp, Glycine max
  Clone ID: 700954971H1
gatcaatgcacttccatttccacctcttctacctctagggtttctcactttcttccacgcatccttctaacttattcaattccccttacattcaactctcctatgccgaatctgcaacaattacactaaatgaattgctaacaacacgcacacaaactctccgtctttttttctttttcttctctctttctctaagaagagcgcgctttctcgtctctcctcgttttaacaggaagcgcatcgcattc

SEQ ID NO: 84523 - DNA, 246 bp, Glycine max
  Clone ID: 700954972H1
gaaaaaatgggttttcttcttctatgtggacggtgtgtgtgattttggcatcactggcctctgcagcactctgtgccaacccacgcaggccagtggatgtacaatttggccgaaactacgtgcccacatgggcctttgatcacatcaaatatttcaatggtggttctgacattcagcttcatcttgacaagtacactggtactgtcttccagtccaaagggtcttacttgtttggtcacttcagca

SEQ ID NO: 84524 - DNA, 250 bp, Glycine max
  Clone ID: 700954974H1
actcggtaaaattggattagggtttcattttcttcttcttcaccccactgtcactgcgcaaatccagttctccccttaccctctccctcggtcctgatcttttcccgccatttcccgcgtttcttttacccagattttgaatactagccgttggatctgccatttttttcaatttttttcgaccgttgctctcgccggagtgaacgggaaatgtctgcgtccgaagcggagaagaaggtcgaggaggaat

SEQ ID NO: 84525 - DNA, 245 bp, Glycine max
  Clone ID: 700954975H1
ctggactgccaaggtgttctgtgaagaggagctagttgaagcaattgccacagccacaggacccaagatagactccttatgcttcattgaggtgattgttcataaggatgacaccagtaaagaattgcttgaatggggctcaagggtttctgctgccaatagccgtcctcccaatcctcagtaatcttcagaatttatcctatgactaaattgctgcagttgccctttagctctatgaaagtgag

SEQ ID NO: 84526 - DNA, 133 bp, Glycine max
  Clone ID: 700954977H1
gcaaaattcaatatcctatttatctagtcttctagacaaggaagataggtctgtacgaattgctgctggtgaagcactggctctaatttttgaacttggagttatagataaattttctgccaagtcagacagt

SEQ ID NO: 84527 - DNA, 249 bp, Glycine max
  Clone ID: 700954978H1
aattaatgcccctttcattttctctgcatctgtagtatctatcaccaatcaattccactcttcttcccatcaaacaacaaaaaatcaatctgggaaacaaaaacaaaatgccgtcattagaggaggaactcttcccatcaaccccaggaaagttcaagatcgagcggtcccaccacatgaaccgccaactctatcgctgtttcgcctccaccagcaccatgttcctgtgggccctcttcttaatcgccc

SEQ ID NO: 84528 - DNA, 248 bp, Glycine max
  Clone ID: 700954979H1
caacagcacaaagcgggttactgtctgttcaagctaccatctctctctctctttcttagtgcctccttgccagaagttaaaatggcccaagaaactttcctattcacatctgaatcagtgaacgaggggcaccctgacaagctctgtgaccagatctccgatgctgtgctcgatgcatgcttggagcaggaccctgacagcaaggttgcctgtgaaacctgcaccaagaccaacatggtgatggtttt

SEQ ID NO: 84529 - DNA, 247 bp, Glycine max
  Clone ID: 700954980H1
gccccttctgccctcccaacccatatacttaaaaaaacccaaaaaaccagaaatagcataaaatttttcagcttctccgccgccgtacagccaccacctccgttcggatctccggcggacctactatccctactactctatttacacggaagaacaaaaaaactatcccacaaaaaaaattcaaaagcggttcggttagggtttagtttggttgtgatattatttcgtgtatctaatttttcatcag

SEQ ID NO: 84530 - DNA, 246 bp, Glycine max
  Clone ID: 700954981H1
gttccaaggcacagatgggaatcttggaccgaaagaatgcattcttttacttggatggcgccctgaggctgtagaaatgattcaagagtatgataactatcttggtcctggaagtgttttggaagtgttatcagacacaccattagatgacaggatcaataaggcaagcaacatccatggtcataacaaactcaggaatgtccgagtttcacatcggattggaaatcccatggactatgacacctt

SEQ ID NO: 84531 - DNA, 245 bp, Glycine max
  Clone ID: 700954982H1
cggctcgagcgtgaaactctcccaagtgaagtcccaacccaatataaatccttctgaaagcaaaagggagagaaaggcttttatttgcacccctaccccgcgatgatggacactttgtctatctagacaacacctttctaccttccttctcagcttcatctcaagtttataactcccctatatccatttattaattgaacaaaatgtgtcactgagtgagagagagagagagagagacatcatag

SEQ ID NO: 84532 - DNA, 130 bp, Glycine max
  Clone ID: 700954984H1
gttcaaattgctgaagtcaagatggaacagcatcaatgaaaacgatatttgtcagtgaaactgtgacgtttctgctgatactgagtgcaaatgtctgagtctcctggtgttggcttcttgtaatcgcaat

SEQ ID NO: 84533 - DNA, 247 bp, Glycine max
  Clone ID: 700954985H1
cggcgtagatcaccttcccctgggcgccgacgtagatcaccttcccccgggcctcgacacagatcaccttctcccgggcctcgacacaaatcaccttctcctgggcgccatcatagatcaccatcacctcttggacgacgaaggtcactctcacctagacgacgaagatcagttgttactcggcataggtcaccttcactagtacgccgaataccaccaaccaatgtgcggagaagatcagactccc

SEQ ID NO: 84534 - DNA, 244 bp, Glycine max
  Clone ID: 700954987H1
ggttcatccgctcccacaacaagaaccgcttgccctacactctctctgttaatcattttgctgattggacttgggaggagttcaaaagacacagactaggcgctgcccaaaattgctctgccactcttaacggcaaccacaagctcactgatgctgttcttcctcccacgaaagactggaggaaagaaggaatagtgagtgatgttaaagatcaaggcagctgcggatcatgctggacattcag

SEQ ID NO: 84535 - DNA, 237 bp, Glycine max
  Clone ID: 700954988H1
agagtgtgcaagtagaataatacccgaactgaatgaagttgtccaggtcactaaggaaaaacatcaaaagaatcgatatacatatatatatatatatatgttccttaatttaattatatagtttgttcctttaactatatatataaagtttgattttgctaccacgactctaggagttaacagtcaacaggagtacttgaagctgaaggcacgttatgagtccctacaacggtccca

SEQ ID NO: 84536 - DNA, 248 bp, Glycine max
  Clone ID: 700954989H1
gaaaaccaaaaaccttactctttttcacgcgacgccctagttcatttttcttctccgttctcttctctctctgttcttcactcactctcattcattcaccatgacgaaacaacatgccaattggtctccttacgataacaacggaggatcatgtgttgcgattgctggagcagattactgcgttatcgccgcagatacgagaatgtccaccggttacaacatcctcactcgcgattactccaaaatct

SEQ ID NO: 84537 - DNA, 242 bp, Glycine max
  Clone ID: 700954991H1
gcatcatggagccatatctaagatacttgtatacatatgtttctatatctggtccacacttaggttatatgtatagttcgaactctatattcaattcaggattgtggctcttgaagaagatcaagggcacacaatgcatccatcaactaactttcacagatgatcatgatcttgagataccttcatctacaatctttcaaagaagaagacacttgcaaacttcaagaatgtgattctgttat

SEQ ID NO: 84538 - DNA, 248 bp, Glycine max
  Clone ID: 700954993H1
ctttctcctaaaacatctccagtgggttcttcttcttctattacaacaacgtcgtccaagaccatgaccatggccatggccacgatcctgctcctgttcacggtcttcgcggtttcatcggccctagacatgtcgataatctcgtacgacaacgcccacgccgccacgtcgcgcagcacgaggagctgatgtccatgtacgagcagtggctagtaaagcacggcaaggtgtacaacgcgctcggagag

SEQ ID NO: 84539 - DNA, 249 bp, Glycine max
  Clone ID: 700954994H1
agaaaatcaaactacaatcttccaccaggaccctctcttctcaccatcattagaaactctaaacaactctataaaaagccacagcagacaatggccaagcttgccaaaacctatggccccataatgcgtttcaccataggccaatcaaccaccatagtaatctcctcaatagaagccaccaagaggttctccaaacccatgactcattattctcggacagaacaaaccccgacatcacaacctcgtaca

SEQ ID NO: 84540 - DNA, 249 bp, Glycine max
  Clone ID: 700954995H1
gccaacccccaaactcctccttctcaagtagtctcatccctcacaccaaacataaaactcccaaacaacccctcatgggttgatttttgaattttattcattgatcaatctccatgccgccccaccgcgatcgcgaccatgaccacgacgacgatcacgtggctgagcaccaccaccactaccaccacagacccatcagaagaaaattggtgaacactcaccacagcggcaaaacacaccctcttatct

SEQ ID NO: 84541 - DNA, 245 bp, Glycine max
  Clone ID: 700954996H1
gtaaagtttcctcttctcatttcattactccaactgatgatcacaatgataatttggacttggatgactggaatacgaggaacaaagctgtggaagacccttttgttactgatgaagtaaacactcagagaaacaatatggaaacaagttcttataatgatactactgttgtatttgatgattctggatcagaggatgatgatcataagtttgatgttgataaaaagtacaatggtgagggatct

SEQ ID NO: 84542 - DNA, 261 bp, Glycine max
  Clone ID: 700955002H1
gaaacagatgaaagagaaattgggtattggagtgctgagttgtatagcctcaattcaaactcttggagaaaacttgatccctctcttctccctcttccaattgaaatctgggggtcttctcgggttttcacttatgccaacaattgctgccactggtggggctttgtggaagattctggtgcaacacaagatattgttcttgcatttgacatggtcaaagaatcgtttaggaagataagggtaccaaaagttcgtgattct

SEQ ID NO: 84543 - DNA, 257 bp, Glycine max
  Clone ID: 700955004H1
ctcgccagctcgcgaacgttggcgtcgatgtcatcgaaggaagctttccttcagcgtcgcaggaagacttcaatgctgtcaagatgatagcacaagaagttggcaacaactgtgatgctgatggctatgttcccgtcattgccgccctctgtaggtgcaatgagaaggacattgccacagcgtgggaggctctgaaatacgccaagaggccgaggcttatgcctttcatagcagtgagccccattcacatggagtac

SEQ ID NO: 84544 - DNA, 257 bp, Glycine max
  Clone ID: 700955005H1
cagaggttcaagatgatgagaattctcaactgcaatcagaagaaaagaagagggaagaagtatttttgaaggacaggatacccacctggtttgcagcttctggatatgtgggcttggctgcgatatccatagcaacaataccaattatcttccctcctctcaaatggtacttggttctgtgctcttacatcctcgcccctgcccttgccttctgcaactcttacggtactggcctcacagactggagtctggcatcc

SEQ ID NO: 84545 - DNA, 253 bp, Glycine max
  Clone ID: 700955007H1
cctgctacctactgcaccagttcctagctcgcttcttctctgttctctctcatctcctcagatcgatcaagcatcagggggctttgagggttgattctctggtgtggtagcaatcagcacaatagaaaatgttttttgacggatatggatatcatgggacatcatttgagcagatatatcgatgctacccagcttcctttattgaaaagccccaaattgaaagtggtgacaaaattatcatgcctccatcagc

SEQ ID NO: 84546 - DNA, 255 bp, Glycine max
  Clone ID: 700955009H1
tctagatcagggtcactgtggttcttgttgggcatttggtgctgttgaatcattgtcagatcgcttttgcattcattttgatgttaatatctctctctctgttaatgaccttcttgcatgctgtggctttctgtgtggatctggctgtgatggaggatatcccttatatgcatggcgatacttagcccaccatggtgttgtcactgaagagtgtgacccatattttgatcaaattggctgttctcatcctggttg

SEQ ID NO: 84547 - DNA, 251 bp, Glycine max
  Clone ID: 700955013H1
ctctctctctctctctcttctctctctctctttcttcctttctttaatacttattaattcatcttttttatctttctttctttctttccccttttgtatttctgggttcgatattgttatcggttatttgtgcactgcttccgccggggctattcaggaatcatggctagggttttggctcagtctgttaatgtccctggtctagtggctgagcataggcatggtcagcaaaagggatcaggaaaattaaa

SEQ ID NO: 84548 - DNA, 253 bp, Glycine max
  Clone ID: 700955014H1
ctcgagcgcttaaaagagcctttgctttttctttaggcctttccgaattaagtacttcgttcattttctctcgaagcaagaaaaatgttcatcgagagtttcaaggttgagagtcctaacgtgaagtacacagagactgagattcagtccgtgtacaactatgaaaccactgaacttgttcacgagaacaagaatggcacttatcagtgggttgtcaagcccaaaactgtcaaatatgaatttaaaaccaaca

SEQ ID NO: 84549 - DNA, 255 bp, Glycine max
  Clone ID: 700955015H1
gatcactcttcttccatcctttcctctctctctctccctctgcatttcccaagagcagatattagaagatggcagacgctgaggatattcaaccccttgtttgcgacaatggaactggaatggtgaaggcaggatttgcaggagacgatgccccacgtgcagtgtttcctagcattgttggtggcctcgtcacactggtgtgatggttggtatgggccagaaagatgcatatgttggtgatgaggcacaatctaa

SEQ ID NO: 84550 - DNA, 257 bp, Glycine max
  Clone ID: 700955016H1
tgttagtgaagcaatggctcaaaccatgttgctcatgtctagtgtctctagcagttattccgtggatttgaagaaagaccttttcctccaattgcagagtcaaagtttaaggcctaagttctctcagctctcattcaacccacttcatcatcaacttcttccttttcttcaccccgtacattcacaactctggccctcttcaaatctaagaccaaagccgctcctgctaagactaaggttacaaagccaaagcaaaa

SEQ ID NO: 84551 - DNA, 262 bp, Glycine max
  Clone ID: 700955017H1
aacaaaggcattgttatttctcaaaggaagtacgctttggatattctaaatgaaactggcatgagtggacattgacagtcccatgaattcaaatcaaaagttgatggctgaacagggtgaacccctctcagatcctgagaggtaaggagactagttgggaaactcatttatctcacaatcaccagacctgacatctcttatgcagttggagcagtgagtcaatttatgcagaatccttacactaatcattggaatgctgtca

SEQ ID NO: 84552 - DNA, 257 bp, Glycine max
  Clone ID: 700955018H1
cgcttcttcatcgaacttgccggttgtcattgacctctctttctttccctttcctttttctccatctctcgcaactcttcacctcaccgcgtcattcgcacgctgagacagcaacctccgaacactgaatcgtgattcgcagtgtatgacgagcgcttcggagctatttcactccagaaggcatcgattgggacgaagtgctctcgatctagggctcgacaccgaactcaacgccgccgattctctccgccgccact

SEQ ID NO: 84553 - DNA, 257 bp, Glycine max
  Clone ID: 700955019H1
ggtatgtttatttattttgacatttccaattggaatttccacacttttctttatatacatttttactttgttatttcatggtcaaggaattccttaatgctaatgaaataattttgacatactcaggtgatttgttcactttgtgggactgaacaagaggttcagcaaaactgtataaattgtggtgtttgtatgggaaaatacttctgtggaacatgcaagctttttgatgatgatgtaagtaaataattctggaa

SEQ ID NO: 84554 - DNA, 256 bp, Glycine max
  Clone ID: 700955020H1
gttattcccaaagccgatacttccttttcaagtcttttctctctctctctctctataataagattcttccctctcccttctctctctctctctagaacttcgtcctccctctgcttctttctttcttagttgcagcgcgattgctgcatcgtcctccaataagagctcgctgctagtgaaccctaacacggcggcaacgagaggtgttcggttgaagctcagatcagcgatggcagcagcaacccgcacttctctg

SEQ ID NO: 84555 - DNA, 256 bp, Glycine max
  Clone ID: 700955021H1
cgatttagcaaaagttttcttattttattttattttataataattgattatattcttatgaaattttgctaggaggatcatcaacaataaatacctcactctagctcacaaataccctgcatctacctccgaaaatgaagaaagcagcgattttgaagtctctccaaaccattatggttgtcttcctgctgatagtactctttagcagcaacaccaaagcagaaaaagaaacaatccacgaccatgcaaacaaaaa

SEQ ID NO: 84556 - DNA, 255 bp, Glycine max
  Clone ID: 700955023H1
attctctattctcttctgcatcaccatttcaccactgagagaacaacacaacacatcaaacgagcctctcggtttccaatgtgaagagagccaacatggctacaatcgctgccaggattctcggttccaactcaaggccagcggtcgcgctccgccgcttgcggtggccggcgtactcctccgcctccgcggtggtggcggagccggagaccacggaggtgaaggactacgccgattaccgccgctccctgtacg

SEQ ID NO: 84557 - DNA, 250 bp, Glycine max
  Clone ID: 700955027H1
gacaaatgctccactggaggaagtgcgcaagaatatttggttggtggactcaaagggattgattgtcagttcccgcaaagattcgctccaacattttaagaagccctgggctcatgagcatgaacctgttagaaatcttgtagatgctgttaataaaattaagccaacagtgttgattggaacatcgggacaaggaagaacatttactaaagaggtgattgaggcaatggcttctattaacgagagacct

SEQ ID NO: 84558 - DNA, 250 bp, Glycine max
  Clone ID: 700955028H1
ggtagtcaaggcctaagatcagaaaacagtgctgaccagaataaaaggcttggtaaaaaaaggaaggaccaaagtgatgaagaagaagaaggtggggaagagaatgaagatgatgaggacccctcagcacagaagaaagctcgtgtggtttggtctgttgagctgcatagaaaatttgttgctgcagttaatcaactgggcctagataaggctgttcccaagaaaatacttgacctaatgaatgttgaag

SEQ ID NO: 84559 - DNA, 251 bp, Glycine max
  Clone ID: 700955029H1
ctgaatctgcgtgtgtttgtgaattgttgttgagatctgaatcaaaatcagaaacgataatggctacaccggaccacctcttcaacctccgcaacaacttctacctcggcgcttaccaagccgccatcaacagcagcgacgttgccaacctctcccaagaagataccctcgagcgcgacaccctcgtccaccgctgctacatcgccctcggccagctccagttcgtcatctccgagatccacgacgatgct

SEQ ID NO: 84560 - DNA, 256 bp, Glycine max
  Clone ID: 700955031H1
gtctcaatcactcactgttggccatggaaaaccaaaaccgtctcaaacttcgaatctctcgcatgttccgatcctcattcgggtcgtgcaggactcgtaacctaaccgatgtaatggaacaagcggtgtttgcaccacccaaccccatcgaagtcgaaccaccctccctcaaaaccatcaacaacacttgcatcctgtcgtttaaggattctcttcccaggcgcaaaatctcggagtggtcatcaccttttgtctt

SEQ ID NO: 84561 - DNA, 272 bp, Glycine max
  Clone ID: 700955032H1
gaagtcgaattcggtcgaactcgagcgattcggctcagatccccccctagctacagagcagccaaaggggaggaataataataagcctatattctaaggccggaaaaatagaaaaggaataacaaaaatgtctggaaaggtaattatctcggctgtttctctcatcctggtggttggagtggccataggtgtggtggtggccgtcaacaagaaggcgatgatcccacacttcaatctcaacaaaaatcagtaggggttatctgccagaacac

SEQ ID NO: 84562 - DNA, 256 bp, Glycine max
  Clone ID: 700955034H1
ctttcttttctttgccaacactcctcctttggttaggggtttagatccgaaattccaaatcgccacgccatgaacgcaaccttatactctgctgcttttcctaccacgtttcgcagtctcgatcatcgcaattactcagcgttatgttcggatatccaaaatcctggctatgttgattaccattcaaattctaataagtctacatctcatgcgtctttcatcttccgttctgattccaccaatagaagcaatgtcg

SEQ ID NO: 84563 - DNA, 258 bp, Glycine max
  Clone ID: 700955035H1
ctctaacccaaatctcaaagaaacaaaacaaaaccctaactgcattaaacccgaacacacatcactctgagttccatccatggcgtcgcaaatggcgatcctcttccgcacgcgcaccctcctcttctccaaacccaccaccaccctcatcaaaaccattaccacattccccttcctctcacaagatccccaattagtggttcccatcccatccccctcttcctcttcaacccctctccctcccaaccccgcctccgg

SEQ ID NO: 84564 - DNA, 252 bp, Glycine max
  Clone ID: 700955036H1
ggggttcctaattactgtgcagagcttgtagccatggcattcatagagaaagctgtgtttttcttgatgatgatgatgacagctttccaagtttcacatgcagctgtgcacaaggttggggactctgctggttggaccatcattggtaatatagattacaagaagtgggctgctactaagaacttccaagttggtgacactatcatttttgaatataatgcgaagttccacaacgtgatgcgagtgacgcat

SEQ ID NO: 84565 - DNA, 251 bp, Glycine max
  Clone ID: 700955038H1
aaagaaaaataaaaacccttagccaacacaaccatcatggccacctctgctattcagcaatcagcattcactggtcaaactgctctgaagcagctcaatgagttcgtccgcaagaccggtggcgccggcaaaggtcgcactaacatgcgccgcaccgtcaagagtgctcctcagagcatttggtatggccctgaccgtcccaagtacttgggtccattctcggagcagattccatcatacctgaccggaga

SEQ ID NO: 84566 - DNA, 252 bp, Glycine max
  Clone ID: 700955039H1
agatattataccactgttggagaaaaccactcagttgagagctcctttgcttatcattgctgaggatgtcactggtgaggctttggccacccttgttgtgaataagctacgtggtatccttaacgttgctgccatcaaagctcctggctttggtgagcggcgaaaggccctgcttcaagacattgctatattgactggtgctgagttccaagctagtgatctgggtctgcttgttgaaaacacctcagtgga

SEQ ID NO: 84567 - DNA, 251 bp, Glycine max
  Clone ID: 700955040H1
aacctatttgtttttttgttgcttttgctttgttgtgttctcttcggaagcggaatcgatcaatccctcacctcattgctgagatctgcaaactggctatggactacgaaccctacgacagtagcggaactgatgatgaccttccaccaacccatcaaaatagaatttccaggggaggaggaggacgtctggctgggaatgggagatctgctgttgcttcaattccttacccaaggatgtacggtgaaatt

SEQ ID NO: 84568 - DNA, 252 bp, Glycine max
  Clone ID: 700955041H1
cttctacatcacatccatccttttggtccctcctgaacctgtctgcatccattcccatttcttcttccgtatgcatgttcccaccgtctaaaaaacctagcaaagcaacaaaacggcgtcatgcttgggaagtagcatgcaatggtaaccctagaaataggagggacattctgatcggccttggaggactctatggtgctacaacaagtctcacaagtaacaacactggttctgcatttggtgcttcattgt

SEQ ID NO: 84569 - DNA, 248 bp, Glycine max
  Clone ID: 700955043H1
acaagattcacgccgagaacaattctctctacaacaccccaccgtgctacgggatttacatgtgtgggttggtttttgaggacttgttggagcagggtgggttgggtgaggttgagaagaagaatgtgaagaaagctgaggttttgtataacacaattgatggaagcaatggtttttataagtgtccggtggagaagtcggtgaggtcgttgatgaatgtgccgtttacgttggagaagccggagctg

SEQ ID NO: 84570 - DNA, 250 bp, Glycine max
  Clone ID: 700955046H1
cttcttcttcttcccttttcattgaccttttccttccttcgtgctccaatggcgactgttccgcacccattatccctcgcaagtgtaggttttgctaaccgaacctcctccatctccagatccactctcaaatgctgcgctcaatctccttctccttcactagttgacaacgcccagaagtttctcgaagcttccaagaaggggaacgtcattcctctcttccgctgcatattttccgatcacctcactc

SEQ ID NO: 84571 - DNA, 273 bp, Glycine max
  Clone ID: 700955048H1
ggatcgtgagttcggctcgagtgggtatattgtttcggactgtgactcggttggagttttctttgacaatcaacactacacaagaacacctgaggaggcagctgctgaggccatcaaagctggcctggacttggattgtggcccattcttgggctatccacactgattctgccattaggaagggactcatttcagaaaatgatcttaaccttgcattggccaaccttattacagtccaaatgagattgggtatgtcacggtgaaccatcaacc

SEQ ID NO: 84572 - DNA, 252 bp, Glycine max
  Clone ID: 700955050H1
gtggaacctctggatctctctctctctgcgatggagtttcgcgtttccgtcatttggagccttctcctcattgtctctttcttctctcctcaaatcaagggtgaggcttctggttccgtcttcttcgtcgatagctccagtaatcaattcattcgcgccagatcatccaactatgagcaaccttcactgttgctagaagaagctggtgctgttgtgtcagtcttgcttggttttgctcctccttccaccctt

SEQ ID NO: 84573 - DNA, 252 bp, Glycine max
  Clone ID: 700955051H1
agcaaatgttgtacaatcaagtgtgctgcctgctatgtttagggacacatataatgcgatcacccaagggaatcccatgtggaataatttatctgttccaactggcactctttatgcttgggaccctacatcaacttatattcatgagccaccttattttagagatatgagcatgtctcccccaggctctcatggagtgaaagatgcttactgtttgctcaactttggagacagtatcacaactgaccacat

SEQ ID NO: 84574 - DNA, 251 bp, Glycine max
  Clone ID: 700955052H1
atcgttactccgcatatgaacactgggctaagattgaggttccaaaggacaaggaggagcttgcagccctccaagcaaggctaagaaagcggtttcctgtggatgcatacaataaagcaagaaaggaattggaccccaataggatcctttcgaacaacatgttggaaaagctcttcccacaatcagacaccatataattttgtgttggttgtgtctatattgtccatattttttatgtttactatatattc

SEQ ID NO: 84575 - DNA, 254 bp, Glycine max
  Clone ID: 700955053H1
gaggctgtactttgcttcttctttctttatccgttccttcttcatcatcatcgtcgtcattctttaatcctggcaaaaaaaaattacgctactttcgttgcgatcgtttccaatttcatgcgctttcttgtgtggggtggattggtggtgggttggttgattttaggtttgggaaagaacgcgtgactttgatgattacgaggattaaattgcatcaacaagtctctatgatatggatcaaatgagtcaacaaa

SEQ ID NO: 84576 - DNA, 250 bp, Glycine max
  Clone ID: 700955054H1
agaatattggagattaatgcagatcacccaattatcaaagacttaagtgctgcctgcaagaatgcacctgacagcagcgaagctaagcgagcagttgacctcttatacgacacggctctaatttctagtggattttctcctgacagccctgctgagttaggaaataagatttacgaaatgatggccttggccttgggaggaagatggggtagatcagaagaagaggagggagatgcttctgttgaagctg

SEQ ID NO: 84577 - DNA, 250 bp, Glycine max
  Clone ID: 700955055H1
gtagtattagcagcagcatatgttgttgtttgtggtcatcccttacagcagtgttgatcagaagaagactatataatagcctttgctccaatcacttcctcttgttcatgccataaactaaaccctttctacagttacaaatctatgctactccacaaagactctttttgcatgagacatcctctctcttaaaaaaccccttcttcagtcaaacctccccaatcatacttttaccatttcaccactcaca

SEQ ID NO: 84578 - DNA, 248 bp, Glycine max
  Clone ID: 700955057H1
gtccaaattctcctcccacccagaatggatgcaagggcatcatcttcttcaatgtccatgattcttttcattacagctattgtggctgcagcttattttcattcatcagaagcagctgtgtcaaaaggatcttttgaggacaatttcagcataatgtggtctgaggaccattttactacctctaaagatggacagatctggtatctctcactagacaaagacacaggatgtgggtttcaaacaaaaca

SEQ ID NO: 84579 - DNA, 248 bp, Glycine max
  Clone ID: 700955058H1
accaagcttctctccacgcccttcttgggtaatctgaagtgcagcgatggcggatggattgcactcgcggcatccatcagtagttcagaagttatctggacagtcttatttgttgtctaggcttgcccctactcactcaagaaactattccacaactggtagttacttcaatggaggcttgcagtcttcgggtttggttccagtcatggcacatgcaccggctgagaaaggagtgtctggatttttgt

SEQ ID NO: 84580 - DNA, 243 bp, Glycine max
  Clone ID: 700955060H1
ggaagaggaatgttagtatagaagagaggcttagtcagattcctgaggaggaagttaggatcatgagggaggaggtcattggtttgatccctagattggtgtacgcagatcctcgatccaaacttgagactcttgaggatgcatttgatgtttcggtgcaggctgtgattgacaaggttaccaacttgaggaaggacattatggaaggtcgcacggacgagaacttcattgaggagaacagtt

SEQ ID NO: 84581 - DNA, 247 bp, Glycine max
  Clone ID: 700955061H1
gcactttggctttggttctcgcgattctgatctctttgcagggaaccccccacgttagatccgatgcctccgatcatcgttacaaggacggagactccgttcctctttacgccaacaaagtcggtccctttcacaaccccagtgaaacgtatcggtactttgacctgccattctgtgtaacaggtcatgagaaagataagactgaagccctcggtgaggtgttaaatggcgatcgccttgttagtgc

SEQ ID NO: 84582 - DNA, 250 bp, Glycine max
  Clone ID: 700955063H1
aatctttgcgccctgataacatcaggatgtttgtattggatgaggcagatgagatgctctctcgaggtttcaaggatcagatctatgatatttttcagctgctgccacctaagatccaggttggggttttctctgccacaatgcctcctgaagccctggaaatcacaaggaagtttatgaacaaacctgtgaggattcttgtaaaacgtgatgagcttaccttggaggggatcaagcaattttttgtcaa

SEQ ID NO: 84583 - DNA, 253 bp, Glycine max
  Clone ID: 700955064H1
catatagagaacttcctcttcgtttcgctgattttggggttttgcatcggaatgaggctagtggcgccctgagtggattaacacgtgttaggagattccagcaggacgatgcacatattttctgcagggagtctcagataaaggatgaagtgaggaacagcttgaattcatcaattatgtctataagatatttggtttcacatatgagctgaagctttcaacgaggccagaaaaatacctaggagatattgca

SEQ ID NO: 84584 - DNA, 255 bp, Glycine max
  Clone ID: 700955065H1
cttcattctttctccttccccgtgactcacccgcgcgggaagagatcactccctccccaacccattcatttcgatctccattctccctgatactcctctctctctctctctctctctctctctctctgtgtgcgagttctagggttttgcggatagaaggataacacacttacacggcgtcgtttgatttgaggggggcgcaatatgccggggcaccgctcgaaatcggagaagcatggcggcggcggcgagaag

SEQ ID NO: 84585 - DNA, 253 bp, Glycine max
  Clone ID: 700955066H1
gtggcactgctgcaagtgcaactccaagaagcgcagtgccaagccaccatgtttcaacattcaacagaagcctttttccttccacttttctctttggaattggttcttctgcttaccaggcagaaggagcagcaagtgtagatgggagaggaccaagcatatgggacacctacactagacagcatactgaaaagatttgggatcatagcaccggtgacatgggagctgatttttatcatcgatacaagggtga

SEQ ID NO: 84586 - DNA, 253 bp, Glycine max
  Clone ID: 700955067H1
caaacctttgcttcactccttcaacgccgtactatcgtttccgagaaccatctctttttttctcgccgctcttccccgcaatcgcaacgcgcgttttgcttctccttttatcgcagattctctgcgtcgtcaccagactcacttccgtgattcgaacgcggcgtggggaagagaaaaccctaatccgacatggggaagaagaagccgacggcgagggacgaagagaacgcgtcgcagcaaggcggcggcggga

SEQ ID NO: 84587 - DNA, 252 bp, Glycine max
  Clone ID: 700955068H1
cccggaatctgctacggccagctcggagacaaccttccaccgccgcgagaatctgtctccctcataacctccgtccatgcgaagcgcgtgaagctctacgacgcgaacccatccatcctccacgcgcttcaagacacgcgcctgcaagtttccatcatggtccccaacgacctcatcttgaacatctccacgaaccaaaccctgtccgaccagtgggtctccgacaacgtcgtaccctaccacccccgcacc

SEQ ID NO: 84588 - DNA, 250 bp, Glycine max
  Clone ID: 700955069H1
ctccaattcaaccatggcttcgagactcacggtaacagccttggtgctgatagctttggcaacagtttctctccaaacctcagcttcatcagtgggtaaattcatcgacgaaaccatcacttcccacaagatcgtcattttttccaagacctattgcccgtactgtagaagggcaaaagctgttttcaaagagttgaaccaagttccacatgttgttgagctcgacgagagagaggatggttcaaagatt

SEQ ID NO: 84589 - DNA, 248 bp, Glycine max
  Clone ID: 700955071H1
ctgggacaaattggaaggacaaggattagcagcatacgaactcaacaaattctgtatctgcgcagaaacagaatttgttgagttcgtatgctgctaaccctgggacaaattggaaggacaaggattgtgctatttacttggtggtttctcttgcaaccaagaaggctggggctagtgatgtctccacggaactcgttgatgttcagagcttttgtgagtctgtgattgtccccgagctgcaaagtgca

SEQ ID NO: 84590 - DNA, 248 bp, Glycine max
  Clone ID: 700955072H1
gaaatagaaaaagcaaaactggtttctcgcatttcctccgaaacaaaccgtttcgctcgtttctcggatctgcaatggaagccccacccaaaggcgctgctggaagaagaggtgacaggaagaagtccgtttccaaatccatcaaagctggcctccaattccccgtcagccgcgtcgccaggtacttgaagaaaggccgttactctcgccgccttggcaccggcgctcccatttatctcgccgccgtt

SEQ ID NO: 84591 - DNA, 246 bp, Glycine max
  Clone ID: 700955073H1
ctgtcatgttggttcccctgctgaaaccctaaaggggagagatcggccaagaagcaacgagtaaccatggatggtgtgtattctaaaccagaaatggtgcttccacatcagatactggagtcaagcatgtcatcataccagcaacctaacactgtttttcttggccaagagcaatttgatccttctttggatatatctaccaaaagtgatgaggaattggttaagattggtggcggtaatctgtga

SEQ ID NO: 84592 - DNA, 246 bp, Glycine max
  Clone ID: 700955074H1
cagagatcagcactctaaaactcctagcttaatatttgagtatgtcaacagtacagattttaaagttttgtatccaaccgtgactgattatgacatacgctattacatatatgagcttcttaaggccttagattactgtcattctcaaggcataatgcatagagatgtcaagcctcataatgttatgatagatcatgaattacggaaacttcgcttgatagattggggtcttgctgaattttatca

SEQ ID NO: 84593 - DNA, 244 bp, Glycine max
  Clone ID: 700955075H1
gaacttttggaccacctagacaaccctgtggccaacaatgcttgggtctatgccactaagttttccccagggtcttaaaatgtatatgacttcttcttccctaatccctatgatcccatccctcgtgcttacctttgtgatttatgtgtagattatatgatcacaataattgttggattagtgtacttcttaaggactaaggttcaatttaaacctcggatgtctcttgtttgttaatatagtt

SEQ ID NO: 84594 - DNA, 246 bp, Glycine max
  Clone ID: 700955078H1
caatgttgcaatttccattcttcctaatccgacctacccactgttgcttccccattcaataattcaattcctgcactgcaccaatggagcttttgaagcctttgcaccctcaccatgcacccattttgcgaattccctttcacgctgtcccctcttcatcttcttctcaatctcagtctcaggttcccctccctatgatttctaaggttcatgtcgctgttgggaaatcgctcgacaaagttgttc

SEQ ID NO: 84595 - DNA, 251 bp, Glycine max
  Clone ID: 700955079H1
agacacaacacaacaaggttgcaaagtgaagaaggattaagccatgaaagctctaattttaatcctcacgctatgcatcattgctgtcaccttctcatcacaagcagcaacctccataggtcactgcaaccccaacccaacgaatttttcaagctcaacccagaccaagccacagaatgatggtagttcctgtagttacacggtgagcataaaaacaagctgcagttctccctcctacaccagagattaca

SEQ ID NO: 84596 - DNA, 245 bp, Glycine max
  Clone ID: 700955080H1
cctgccacaacactacactagcaagcacacacctttagcacaatcaccaatggcttcttccgacagcaagcttcccctgagacccatccctgggagctacgggcttcctttctttggacccatgattgacagacatgactatttctacaaccaaggacgcgacaagttctttgccgaacgaattaaaaagtacaactctacggttatacgaccaacaagccaccgggtcctgtcatttcctctaa

SEQ ID NO: 84597 - DNA, 252 bp, Glycine max
  Clone ID: 700955081H1
gaacaatccagcaaaatatgttgggctcaaaggttatggtttgacaatttccggtaggatcccattggtatcacttatcacaaaagagaacaagcgatacttggagaccaaacgtgtgaaaatgggtcacgtatatggctcggaatttaacagcaaattgaactatcaagacagtggcaatggtaaagtcaatagtgatgatgattctaatgctgctcctggcttataaagctgcttctcttctgccagata

SEQ ID NO: 84598 - DNA, 250 bp, Glycine max
  Clone ID: 700955082H1
gctggatgcgcccagaggacatggactatgaccgccctgtgactgaatgccatagttgttctgatcttgcagctgagatggctgctgccttggcatctgcttccattgttttcaaggacaacaaggcctattcgaagaaactagttcatggtgctaccacgctgttcaagttttctagggagcagagaggcaggtacagtgcagggagttcggaagcttctatattttacaattctaccagttactggga

SEQ ID NO: 84599 - DNA, 250 bp, Glycine max
  Clone ID: 700955083H1
cttgcgtgtgtggttgtaacttgtaaaattattttgtatcccacaaaacattgtcaatttgatttgatcccatcttactccattcgagttgacaagaaaaaaaatattgtattttggccacaatttccagccaagagaagaaggagagcggaaagtaatagacggtcatcgtctgtgcacccgtcatgatttgacttcaatatgttatgggattaaactgattcttgtctcatatttgagggggcaaaag

SEQ ID NO: 84600 - DNA, 246 bp, Glycine max
  Clone ID: 700955084H1
gggtaagcggatttagggaaggaaaatggagaaacattagattagattgttggcatccacgtttggctctgcattgctgtctgtttagatcttttattatttggagagaggaaagtagagttatactctagatcttccctgtccccttctggatcatttcttcttttcattgcttcttctgccgagccattcagtgggtgttaacactttttttctcctcaaccaagacatttgacgtgttatatt

SEQ ID NO: 84601 - DNA, 248 bp, Glycine max
  Clone ID: 700955085H1
gtgaagatgaaggggaaaagccaaagccaaaggattggaaaaaagagtagaaaaatgaagggcgcgttgagtaccactaccaacaccactagacacttgcagcttcagctaggtcaagtgtccctcattccactccaacaaccgtcttctactactgctactacttcttccgcagtttcttgcttccagaaccttctagatgcagaagctcccaatgcgtcttcctctcgcgtggcgctcatcgacaa

SEQ ID NO: 84602 - DNA, 243 bp, Glycine max
  Clone ID: 700955088H1
ggcgtaacaaaagttgcgtagcatactctgattcattagtgaagaaaaatggcaaccatcatcgccggcatcccaactacatcgatcactcgcgcaggtcttgtgctcaaacgacctgttggagcctcgtcctctaccgttcttggattgccagcaatggctaaggcagggaaagtgaggtgctccatggaggaaaagccttcaagcagctcaaatatagggatgggggcatccttgttagca

SEQ ID NO: 84603 - DNA, 243 bp, Glycine max
  Clone ID: 700955089H1
ctctctcaatggcttgcttctctttaaacctctcagctcttcacatgttcagaccatgcgtatatattcctcaaatcgttgcaaatccattgcagcatcagaatcgtaaaatcaagatcttagcttgccaagctaatcaaaatcttgaccaatcgtccacaacggaaaaatctgttgctgagcttggcaatagcaaaggaacaagttccccaaatggtgttccccctaaattcccaagcaagg

SEQ ID NO: 84604 - DNA, 245 bp, Glycine max
  Clone ID: 700955090H1
ctattattctcgttttcaatatgcagatcttcgtcaaaaccctaaccggtaaaacgattacgctagaggtcgagtcctccgacacaatcgataacgtgaaagctaaaatccaagacaaggaaggcattccaccggatcagcagcgtttgatcttcgccggtaaacaactcgaagacggcagaactctcgccgattacaatatccagaaagaatcgacgctccacctcgtcctccgccttcgcggt

SEQ ID NO: 84605 - DNA, 243 bp, Glycine max
  Clone ID: 700955091H1
atcattcaccaatgcatgtggcacatgccacccaaaacctaccccttctcctcctcctccatcaggaaagtgccctaaggacacattgaagctaggggtgtgtgcagatattctaggtcttgttactgttgttgttggctcccctgtctccagcaagtgttgtgcattgcttgaaggtttggctgatttggaggctgcactttgcctttgcactgctattaaggccaatgttcttggaatcaa

SEQ ID NO: 84606 - DNA, 241 bp, Glycine max
  Clone ID: 700955093H1
tgatggaagaggtgtcgatgtttacattgccaagggtgctggcatcacggtgcagtttgtgaagaacatcatcatccatgggatcaaggtctttgacatcgtgattcgtgagggtgggatgatcagagattctgagacacattatggtttcaggactaagagtgatggtgatggcatttccatctttggtagcagcaatgtttggattgaccatgtttccatgagaaattgtagtgatgga

SEQ ID NO: 84607 - DNA, 241 bp, Glycine max
  Clone ID: 700955094H1
aatttattctagtaatacatttctgggttttgtttgccttgtgtgtatctttctattgacgagaataatggaatgttcccaattctctgtttttttgcttttgtccatttttgtgggaatttgtttagcttctactgaggaacaggaaagggacaggattgccaagctgccaggacaaccagaaaatgtgctatttgcacactactcaggctatgtgactgtgatgaagaagctgggagag

SEQ ID NO: 84608 - DNA, 251 bp, Glycine max
  Clone ID: 700955096H1
ctttcattggtgtggcctagctgttttctcaatgagaaagccttcatctctgcaaagcgcacttttgcgctttggggttcccttgttgcttgttatcaccttctgttatgctacttctactgctgcagcaaaactcaagtttcagggaatgaagagctgccaaagacaaacctaaatgggcatgatgaagaagcaaaattcggattttttcatcataaaccaatattcaagaaacatattccaattccagt

SEQ ID NO: 84609 - DNA, 265 bp, Glycine max
  Clone ID: 700955101H1
ctctcctcggcgacgacggcggagccatgggcaacatcaatttctccggctacgtgttgcagaatggagtcaaatcaggcagcttcttctatggaagttgagactgtcccatctgaagccaaacttttgccaccaaagccaaagtttgagcctttgaagcctcatgagatgtctgatggtcaggtacagttccgcaaggtgaatgttccacctcatcgtaatacccctctgagaaagcttggatggacatctatgctcccatatg

SEQ ID NO: 84610 - DNA, 255 bp, Glycine max
  Clone ID: 700955102H1
cgtacgtgaggtcgggctatgggacttttgtctacactcgccctcttgatgcacaagctccttcctctaaggcacagctttgcgaggagttcgactctatgggggtcgcacttgtccatggagaacttgagcatgaccagattctggcagtgattaggcaagtagacattgtgatatgttctcttccataccctcaagtgatggagcaactcgaaattatagatgctatcacagttgctggtaatatggggggat

SEQ ID NO: 84611 - DNA, 269 bp, Glycine max
  Clone ID: 700955103H1
gtgatgtggagacaaatgagtgtttggagaataatggtggttgttggcaggataaagtagctaacatcaccgcatgcaaggatacgttccgtgggagagtatgtgaatgccccctggtggatggtgtgcaatttaaaggagacggatatacaacctgtgcagctagtggacctgggcattgcaagataaacaatggaggttgttggcatgaagctaggaatggactgcatattctgcttgttcggatgatggaggggttaaatgcaagt

SEQ ID NO: 84612 - DNA, 266 bp, Glycine max
  Clone ID: 700955104H1
caagctttccattctcatccctgctattccagctgccatcgttgctgagtgctttggctttggaagaccttggatttttatattaagcttacttggacttacaccacttgctgaacgtgtgagcttcattacagaacaagttgccttttacactggtcccacagttggaggacttctgaatgctacatgtgggaatgttactgagctcataatagcaatatttgcccttagcagtaacaaaattgccgtggtcaagtattctctgt

SEQ ID NO: 84613 - DNA, 266 bp, Glycine max
  Clone ID: 700955106H1
aaggccccttctgccctcccaacccatatacttaaaaaaacccaaaaaaccaaaaataccataaaatttttcagcttctccgccgccgtacagccaccacctccgttcggatctccggcggacctactatccctagtactctatttacacggaagaacaaaaaaactatcccacaaaagaaattccaaaagcggttcggttagggtttagttttgtttttatacgtttcgtgtatctaattttgcatcggtaatattatttttggg

SEQ ID NO: 84614 - DNA, 253 bp, Glycine max
  Clone ID: 700955107H1
tctgtacagaacttgcatcatatcttcccagccgtcgtgaattcttagcggccgtcctttttatttttcctttttttttttcaatagtgaatatttgtgtacaaacaagcttgcttgctaaggctttgtatattttttgactatggcaacagtaagtttatttagaagcactcgttttgttcgagtaaaaaagagaaacaacaaagaggaaaaagaaaaaacaaaaaagagcctaacgccgaatttgaaggag

SEQ ID NO: 84615 - DNA, 259 bp, Glycine max
  Clone ID: 700955108H1
attcttcaaaaaattctcgcgactaaattcacgtcagtacacggaaacataaaattcagtttttttttattaaaatttgttggcaaacaaaaacaaaaaaaaaattgaaattttgatccgttttgccgaattggaccgcgcgttcaattgggttgtcgaattcgaggcaaaggaatcgtgggtgtacgaggaatttcgactgtgttgttgaactttggtgattgtcagcaaacggtgtcgattggtttgagagaagctg

SEQ ID NO: 84616 - DNA, 260 bp, Glycine max
  Clone ID: 700955109H1
cttgtttgcagtttactggaggctatagatgttatgcacgaaggggtgcagaacctggtgataccaatacaaatccagtttgaatctttgaactccaacaacgtgcaccacaatgacaacaccacctactgttggctaactccagaggacgtgttccgctacctccttaactcaattggtgtgttttccccaacaccggggaaccccatcaacaccttaggcgtcattgacacacaaaacctttttgcagtgtgctatga

SEQ ID NO: 84617 - DNA, 261 bp, Glycine max
  Clone ID: 700955110H1
catgactctttctcacttttccgctgccattttcatctctttccttctcctcactctccaccaccacgccgaatcaactcagcctccctattcctgcgactcgtcctccaactcaccctactacccattctgcaacaccaggctccccatcagcaaaagagcccaagacctcgtctcgcggctcactctcgacgagaaactcgcccaactcgtcaacaggcaccggcgattccccggctcggcatcccgagttaccagtgg

SEQ ID NO: 84618 - DNA, 254 bp, Glycine max
  Clone ID: 700955111H1
aaattgagcaatgaatttgtaaatagggcaaaagtaatggataaggaattaatttctctggatatattagaaaaccgaattcgattgtctaatgatgaaactaaaacaaaatatttaactaaaatatatgatcctttcctgaacggacgctttcgtggacaaatcgaaaatgttttttcaacctcaatccaatatgaaaaaaatgaaaaaaaaaataccattttgataaataaaattcatggtatccttatttc

SEQ ID NO: 84619 - DNA, 258 bp, Glycine max
  Clone ID: 700955112H1
tgaagagacaacacacacaataggattgtctgttcttgtctgatggaaacctttcattataagtcccatagaagggcatagttttcgtgacatcgtgtgttgttttgaggacgaataccagacatcatgggggaagaaaatggcgaaggaagatccttagctgaaacccccacatatgccgtggcaactgtgatcactgtcttggtttctcttagttttttgttccaaggcacgttaaaagaattggtaaagtggttg

SEQ ID NO: 84620 - DNA, 258 bp, Glycine max
  Clone ID: 700955113H1
gttccctcttcatccattctcagcctcaaggaaattcatttggtgggaaaatccaagaagagggtggaatttcaagccagggaagatggattatttcaatgcaccaggaagaaaccatctctttgttccggggccggttaacatcccggaccagatcattcgggccatgaacagaaacaatgaggactaccgttctccagcaattccagctatgaccaaacactgcttgaggatgtcaagaagattttcaagaccata

SEQ ID NO: 84621 - DNA, 262 bp, Glycine max
  Clone ID: 700955114H1
gatgccatgacaaggcattctgaggccacggacttcagagattggtgtgagaatgagtgcgttaggcttattgggacaagagatacaagtttccttgaattttgcttgaagcaatctagatcagaagctgagatgcttcttatagaaaaccttggatcatatgatcctgaccatcaattcattgataaattcctcaattacaaggagttgttaccgtcagacgttttggacatagcttttcagagtaggaatgataagagag

SEQ ID NO: 84622 - DNA, 265 bp, Glycine max
  Clone ID: 700955115H1
gttagttcattctctttgcgcagttccctacctctcctttcaagatgcagatcttcgtcaagaccctcaccggaaagaccatcacccttgaggtggaaagctctgacaccatcgacaacgtcaaggccaagatccaggacaaggaaggaattgccccggatcagcaacgtctcatcttcgccggaaagcagctcgaggacggccgtaccctcgccgactacacatccagaaggagtcaacccttcaccttgtccttcgtctccgt

SEQ ID NO: 84623 - DNA, 278 bp, Glycine max
  Clone ID: 700955116H1
ttcggctcgagagagagatcgcgatctggaatagggtttagctgaaaggtcgagttgaaatgggtttctttggtaccattttggggtttttgggatttggggttgggatttcgattggtctcgtgtctgggtactttctcttcatctacttccaacccaccaatgttgaggatcctgaaatcaagccattgtcggagcaagagcaagagactctgcaacgaatgtttccagagatcctctttggataaagaatccggattttgatcggcttgattggc

SEQ ID NO: 84624 - DNA, 264 bp, Glycine max
  Clone ID: 700955117H1
agtgatatggcttcaagaactatatgttttaccattcaagtgactcttgtagtagcttttctaacaacaaaggttgttttatctgatgacactgtgccaattcccgcgaacaaagcacaattaggtgaatggtataatactaatgtggggcctttagatcaaagaaagagcaccgtggacccagcattggtgactgctgaagaaggcgctaaggttgtaaaggtgagcaagatggcagtggggaattcaagaccatcactgatg

SEQ ID NO: 84625 - DNA, 266 bp, Glycine max
  Clone ID: 700955118H1
ggctcgagccgaatcggctcgactttttcttcccatttcagccctcgtctttccttgtttccggtgagggccaaccacaacatgtgttaaacaaggaacaacctccaaaacataacatcctacgccaaacaaaactttgacctccttcagatctatacccttctctctctctctcttctattttcggattctacatcatgggcacggaggttctacggccacggaatgtttcacccaacgcatcggtgtcccaccgcctgggtttt

SEQ ID NO: 84626 - DNA, 265 bp, Glycine max
  Clone ID: 700955119H1
ccctaaacgactctatctctcttcgttttgttcttccttgcgctcctcctcgttcgttcgttctccctcgcgtagatcggcaatggcggagaccgagacgtttgctttccaggctgagatcaaccagctcctcagtctcatcatcaacaccttctactccaacaaggaaatcttccttcgtgaactcatcagcaacgcctctgatgctttggacgagattaatttgagagtttgacggacaagagcaagctcgatgctcagccag

SEQ ID NO: 84627 - DNA, 253 bp, Glycine max
  Clone ID: 700955120H1
cccaagcgcgccgtgagctcttcgacccgaaatccgaacccgaattcggtttcaatctcagagagagagagagagagggagagagcgaaacactgacctagctcgcagaatcgacaaccacttctcactcttcaatcgcgactgtgtctttgatgggtccgaggtatgcgccaccagacccaacactccctaaaccatggcggggtcttgtggatggcaagactgggtatctttagttttggaatcctgagac

SEQ ID NO: 84628 - DNA, 257 bp, Glycine max
  Clone ID: 700955122H1
tgcgcattcaacctaccttcgctattgcatggtcaaatcttgctggtctgttcatggagtctggtgatttcaacagagcccttcagtattacaaggaagcagtaaaactaaaaccttccttccctgatgcatatctgaaccttgggaatgtatacaaggctttagggatgcctcaagaagctattgcatgttatcaacatgctcttcagacacggcaaactatggcatggcttatggtaatttggccagtatatatt

SEQ ID NO: 84629 - DNA, 256 bp, Glycine max
  Clone ID: 700955123H1
gtaggcggatctcctttagtcctttgtctccgttccgtcgtcaaccctacctttggatctgcgtttggccttcaggttttgaagtccgaaggaggagaagaagagattcctgacagcgtaatcatgtttggtgtcgtaaggcgaagggttgcttctggcagcccgtctccttggttgctaggtcagtcagctcagaaaatccggtctggcccatcagtttctgctagagcttcttccattgtggaaaaagagattg

SEQ ID NO: 84630 - DNA, 255 bp, Glycine max
  Clone ID: 700955124H1
agcgcggcgaaaaccaatgggttgataaaatttacgagctcatggaagctgtggatgactacattcccatccctcagcgccaaactgaacttccctttttgctggccattgaggatgttttcaccatcaccggtcgtggaaccgtcgccaccggaagggttgagagaggtactattagggttggagagactgttgatattgttggtgtgaaggagataggaacaccactgtgactggggtggaaatgtttcagaa

SEQ ID NO: 84631 - DNA, 256 bp, Glycine max
  Clone ID: 700955125H1
ccataaccctctctttctctctttaatcttaaaccccgttacgacgtcgtacggcttgggctctttctccctctacccgaaccgaacaacaatcgtgaaagagggagaacagagtaccttcattctctctctctcttactttctctattgcgacgcgtttgattctctcgcttataatatatttctccgctggcgctctcttactggccggcgattgtttcggatcgatcgccgacgccgtcgagttcactcgctc

SEQ ID NO: 84632 - DNA, 253 bp, Glycine max
  Clone ID: 700955127H1
gttgggttttgtggtcatgtccatgactgtgagagagtatgccccatttatcagaatcagtgtgtgaatgaagaaaagcatcactactctggcactgtgaatggaacagttcatgtggttgttggtggagggggaagtcacctgtcagacttcacaccatcaccccctatttggagtctttatagggacgttgactatgggtttggcaaattgactgctttcaatcattcatatctcttgtttgagtacaaga

SEQ ID NO: 84633 - DNA, 257 bp, Glycine max
  Clone ID: 700955128H1
ggctacctttccctcccctccttcaccatcttcttcttcttcaattccgtctccaagatctagaatgttttactatgctggaggtgaagaccactatgaggagcctcacttcctccaagcttgttttctttgcagaaaaccactaggccaaagtcgtgacatcttcatgtacagagggaacacaccattttgtagcaaagagtgcagacaggagcaaatagagattgatgaggcaaaggagaaaagttggaagcttt

SEQ ID NO: 84634 - DNA, 265 bp, Glycine max
  Clone ID: 700955131H1
cataaacaaaaaagataaactggggagaagcatgttgttgatgttgggactatgcttcctattgttctctgcatttccacttgcgttctctgagagatgccacccacaagacaagaaagcgttgctccaactccagaaggacctcggcaacccttatcacatcatatcctggaacgcaaaggaggattgctgcgagtggttctgctgcgttaagtgtgacgagaaaacaaaccgcgtcattagcgatgccttatcatcccctttt

SEQ ID NO: 84635 - DNA, 256 bp, Glycine max
  Clone ID: 700955133H1
caaggagggatctctctctctctctctttctctcctctcacacccccaaaagcttcttctgttccgtgcaggcaatttttctttggtttggttgcatcttttgatctgatcaacaagtttgagaattcagtttgggaaaggccattcctctttagtacaaaacagattgagggtgcctttgtgctgatggccactaatgaaaatcttccaccaaatgtaattgagcaacttgccaaggagttgagaagtcttgatg

SEQ ID NO: 84636 - DNA, 217 bp, Glycine max
  Clone ID: 700955134H1
attcaacttaagagatcaatatggccaccaccactacccagcctccctctaatatctgttttttccttctgttgttgcttctagcacactttcatttgggcataagccaacttgagctgaattactactctaaaagctgcccaaaagctgaagagatcatcaaggaacaagtcacacaactatataacaagcatggaaacactgccgtttcgtgggt

SEQ ID NO: 84637 - DNA, 262 bp, Glycine max
  Clone ID: 700955135H1
gaaaaagatgggtgaaggcgtagttgagagagctctgaacagcttaggaaagggcttcgacttgacctcagatttcaggctcaagttctgcaaaggcgaagagcgtttggttcttctcaacgaaacagagaaacgggagctcacggtgccaggtttcggacccatcagagatgtctccgttgacatcaaatgcgacaagggcgatcgcacccgctaccaatccgacatccttaccttcacccaaatgtcagagctcttcaac

SEQ ID NO: 84638 - DNA, 261 bp, Glycine max
  Clone ID: 700955136H1
ccattctctctgtgtatttccctacctctcccttcaagatgcagatcttcgtcaagaccctcaccggcaagaccatcacccttgaggtggaaagctctgacaccatcgacaacgtcaaggccaagatccaggacaaggaaggaatccccccggaccagcaacgtctcattttcgccggaaagcaacttgaggacggccgtacccttgctgactacaacttcagaaggagagtactcttcacctcgtcctccgtctccgtgg

SEQ ID NO: 84639 - DNA, 257 bp, Glycine max
  Clone ID: 700955137H1
ctgggttgcagggaaagagaaaaatgaaatgggttccgatagtagcaacttggagttcttgaaggagatcggtttgggctcctccaacattggttcttacattaatggccgatggaaagccactggttcttctgtcacttctgttaatccttctaacgatcggagcatggctcaagtgactgaagcgactttgcgagattatgaggagggattgaagcttgcagtgaagcagccaagacatggatgactattccggc

SEQ ID NO: 84640 - DNA, 254 bp, Glycine max
  Clone ID: 700955138H1
tggggttatgggctgcgatatgaatatgggctgtttcgtcagatcatagtggatggctttcaacatgagcaacctgattattggctgaactatggaaacccttgggagatagaacggattcatgtaacatatgaagtgaagttctatgggactgttgaagaggttgagatgaatggagaaaaacatcaagtttgggtccctggagagacggtaaagctgtggcttatgacaacccaatacctggttacgggaca

SEQ ID NO: 84641 - DNA, 252 bp, Glycine max
  Clone ID: 700955139H1
ggagggcttggtggtgcccccgttaaccagggggggccgcctgctccatatgcgaatcaacctgctatggggtatgggaaccagccagcaatgcaacccggataccagagtcctcaaatgggacagagcagtggtgtgagacctcatcctggtgctggtgctccttacatgggtcattaggtgagtggctcatgaatttttattctgaattttgttaatacatattctgccctatctttatgatttatgagt

SEQ ID NO: 84642 - DNA, 253 bp, Glycine max
  Clone ID: 700955140H1
cccttgctcgcgttcgcgggtttgttcttcctcttccggagagctcaaggcgggcccggtgggctggcgggatgggtgggcccatggactttggacggaacaagtccaagttccaggaagtccccgaaaccggtgtgagcttcgctgacgttgcgggcgcggaccaagcgaagcttgagctccaagaggttgttgatttcttgaagaatccgataagtacaccgcgttgggcgcgaagattccgaaggggtgt

SEQ ID NO: 84643 - DNA, 246 bp, Glycine max
  Clone ID: 700955141H1
gggaggtggcaataatgagaaggcaagagttatcgaaaccctgctttttgtagccggtattaacacattgttgcaaacgatgtttgggactcgactgcctgcagtgattggagggtcttacacctttgttccaaccacaatctcaattatccttgctggccgattcagtgatgaaccagatcctatagagagattcaagagggtaatgagatgatccaaggtgctcttattgttgcttcgactctt

SEQ ID NO: 84644 - DNA, 251 bp, Glycine max
  Clone ID: 700955143H1
catctttgccttctgcatgttggttctctgtaaacagatactgcaaaagaagaataatattgaatatttggttgggttgaatccctgggttgaagcgttgcagacatcacggctattctaagagtgtctcgctctctcattcatgtcccaactgtacgacggaggacaggttgcgtaactgccaccaacccttcgccgcacggtgggcgtggtgctttgccttctgaaggtggtagcccttcagacttgct

SEQ ID NO: 84645 - DNA, 241 bp, Glycine max
  Clone ID: 700955144H1
ctcaacccagcattttcttcacagataagtcagggttgagattcaccaatttgggatacccatttaggtagagggatatcccaaattggtgaatctcaacggggcattttcttcacagataagtcaggacagcattatgaagaatgcttgtgcctggcagttgataatctacctgttattgatgggaagggtccagtccaagtgtaccagatttctgtgagagcttcaagtcttcattctc

SEQ ID NO: 84646 - DNA, 254 bp, Glycine max
  Clone ID: 700955145H1
caaaaatattaagatgataaacattggagcacttgttgtactctttgcatttctcttcctcagttgtgcctatgcacaagacacaacaacccttgtgcctgcaatcataacttttggtgactcagccgtggatgtagggaataatgactatcttcccacccttttcaaggctgattaccctccttatgggagggactttgctaaccaccaactactgggaggttttgcaatggcaaattagctactgattttac

SEQ ID NO: 84647 - DNA, 254 bp, Glycine max
  Clone ID: 700955146H1
tcgttacacatttctcacctaactttctattcttctcagtctcagatcagaaccttagccatggcagcgttccagaagatcaaggtcgccaaccccatcgtcgagatggacggagatgaaatgactagggttatctggaagtcaatcaaggacaagctcattttgcccttcttggagttggacatcaagtattatgacttaggccttccttaccgtgatgagaccgatgataaagttacaattgacagtgcgga

SEQ ID NO: 84648 - DNA, 260 bp, Glycine max
  Clone ID: 700955147H1
cgagacacagaaaaaaaggtttcttcttcttcttctactttttcttcttcttctatgactcattcttcttcttcttcttcttcccatgtcgaaatcgaaattcatcacttcaaatttcacatccctttggtgctttcttcgtagatcccactctccgcttcatcgtgatacctcactctcagatggccgcaaattctgggaatatctcgtttgcgtctctcagtctagttcacagattcatgggagcactgatactgtcc

SEQ ID NO: 84649 - DNA, 254 bp, Glycine max
  Clone ID: 700955148H1
tcggctcgagctcgagatcgagatctggactagcgcttctcactactcacactactcttcctcttccaagccaaagaaggagtttccattagccctttgcaattgatcacacacccacttgaccccttaacgaagcaagagatcaccctacgtccaagccacagtcctaaagagataccccacaccacccaaccatgtcttcttccactacgtcggcctcgacgatcccgacaagaccacgtcctagagtgggc

SEQ ID NO: 84650 - DNA, 254 bp, Glycine max
  Clone ID: 700955152H1
cctatttatatagaagtgagggttttgtgaagtggatccaagccaagcacccgatccattcggctgcatccacgggcatgtgggagtgcccgggtttttatcccgtttctttgaaagggaaaaacgggttagacatatccgtagttgggagtagtagtattaagcatgttctcaagaatagccttgaccttactaggtatgagtactacacaatggaacatacttcagaaatgaggataagtatattccggata

SEQ ID NO: 84651 - DNA, 251 bp, Glycine max
  Clone ID: 700955156H1
gtatagcccaagccctatacaaccagaccctaacgcacacccatatgattcagtttccatggctagcctcaaggttgcatctttggctgcagagctctgcgtggttgtgtgtgagtgcacccatggcacgtgcaactatcacgtgcgggcatgttacgaatagcctgaacaattgcatctgttgcctccataacgtgaggaacgccgccgtctggatgctgcaacggtatgaagagcctcaatgccgccgc

SEQ ID NO: 84652 - DNA, 244 bp, Glycine max
  Clone ID: 700955157H1
gcgagagagagagaggaacaaagcagcacccatttggatcctctcttctcttctttgatctccgttacccttcttgttgtctcgacagagagagagagagagaatctttcgaagttcgtgtgcgtgtgttgtgtggtcgctacaccgatatcagcaccacatgtgagagcacgtgtcgattacgattacctcgtcaagcttcttcttctgagcgatacggtgtgtgagagagagtctcttttgc

SEQ ID NO: 84653 - DNA, 250 bp, Glycine max
  Clone ID: 700955159H1
acaccttcaatacaccacactcttctagcaccttgcagtggctgactcggatcgctcttctagtgaagtaactacacgttctactgattcatggaagcgacggtcgtccacagttgaattatctgcagatgaggagactcttctcatcaggatgtataaactggtatgggagaggtggtctttaatagctggaaggattcctggaagaacagcagcagagatatagaagtattggactacaagattctcc

SEQ ID NO: 84654 - DNA, 254 bp, Glycine max
  Clone ID: 700955161H1
ctcgagcaccactctagcgttgttgcattgcagcagcgtctccatcatcttccacgatggccgcgcgaggcctgttgatcagaaaaaccctatacaccgttctccgcgacgacgacgagcacataatctgagctggcatagctgcagctacacatcactcgcgggttgcacgtgtacacgctctccgatctcgattacgacaatagcgctctctagccaccatcatcggcgagatcatgcagctgcaccaccag

SEQ ID NO: 84655 - DNA, 260 bp, Glycine max
  Clone ID: 700955163H1
cgcaggaagcgacgacggtggtgataatcggtgccggagcttctggtatcgtcaccgccggttgcttaacgacgcaatcaataacttacatcatgatcgagagaagagactgtttcgcttcgctgtgtcagaaatatacctatgatcgtctccaccttcatatgaggaagcaagtttgcgagttatcgcactaatcgtgtctcaagtcttcacctcactacgtgcgtcggaagcagttcatcagactacttgggagacta

SEQ ID NO: 84656 - DNA, 253 bp, Glycine max
  Clone ID: 700955164H1
ggaagaacgtcgaggacaatgctacctacgagtcgctcttcatcgcgctggccagcgaaggcaccgacgttagggcagttttcgagttgatccttcttcgatcacagtgtgaaggagaggcacacgtgcatagccatatctagaggactcttgagagcgcggcttataccttgaagtatcgtggtagtatgtggggttacaagcgctgtgtcacgagagcactctatagacgtcagactaccttaaagatgat

SEQ ID NO: 84657 - DNA, 259 bp, Glycine max
  Clone ID: 700955165H1
ctcaaaaccagatctagggtttattttccttatcttttagaatttgaacaagttttgcgtcttcaaagggaataggatgggagaattgaaggacactgaggcttacgaggaagagctcatcgactacgaagaagaagaagaaaaagctcccgattccgctaaacccgttagtgaatctggcaagaagggttatgttggcatccatagttcgggatttcgagacttcctgttgaaaccagagcttcttcgagccgttgta

SEQ ID NO: 84658 - DNA, 200 bp, Glycine max
  Clone ID: 700955166H1
tttgaagagaagagtctagaaacaacacaacacaacgcgaatggctacggcgctggagaagaaagcgaaggaggcattcttcgacgacgaattcggtctggccgacgaactctactctgaagccatacgattggatccgaacgacgccaatctcttcgcggacagagcccaagcccatatgcaactcaacgctttcactg

SEQ ID NO: 84659 - DNA, 254 bp, Glycine max
  Clone ID: 700955167H1
ttttgataaaatggtatccaataagtggattggatatggaaattttctgataattgatcacttaaacactaacatctggcaatttctacatgggagctatataattgtcttcgttttatgtcttttgactttttatcctatgtgcttaattagctaaccccacatctagcagtaaagcttttttctgctgttcacagttagtggccatcacgtatatgctttcctctatggcagattttacctgtcgttgagtg

SEQ ID NO: 84660 - DNA, 236 bp, Glycine max
  Clone ID: 700955169H1
agcatggttaggcggactacattgaatgatagcaaagagaatgtttgttgtaataacattaaaggaggcgtgtttggagttgttgaattgccgagtttagctgcagaaggtagagagagagagagatggagagcatagagcacagaacggtggaagtgaacggcataaagatgcatgttgcagagaaaagaggaggagcagtggtgttgtgcttgcgacgcttcccagaactctgg

SEQ ID NO: 84661 - DNA, 245 bp, Glycine max
  Clone ID: 700955172H1
cggaatatgagaggtgggggataagggtactatgtgttgggtggatcttgctatcttgtgttgtgtgtgtgaagggtgtggagccaaaagcctcacccacttgtacatttccggcagtttgcggactttggggagtcaaactcagacactggaggcatatcagcttcatttgtgccaattcctgcaccttatggcgagggcttcatcacaagccttctggaagggactgtgatggccgtctcatt

SEQ ID NO: 84662 - DNA, 247 bp, Glycine max
  Clone ID: 700955174H1
ctcaatctttcccagcttttttatttaccagacacactcactactacccttttcacacccaactatctctctccctctctcctcaactccaacccaatcaacccacttcattaatcactccaattgttgtcccactttgtcacattgctactactactcctttaactcctctcccttgtttcctaatataattcccaaaatcacatcattttgcttcaggttccagagacatatacatgataaacct

SEQ ID NO: 84663 - DNA, 79 bp, Glycine max
  Clone ID: 700955175H1
gttttccgcacgccactttgatatgttatacgggtgcattactgtattttgagtgattatttcaataatgggtggtact

SEQ ID NO: 84664 - DNA, 245 bp, Glycine max
  Clone ID: 700955176H1
caccaacaatggtgaagcattacagacccccggggaagaaaaaggagggaaatgctgccaaatttgttattaggtcacaggcactcaagcagcttcaaatcagtttaccccttttcaggaaactatgtattttgaaaggtgtaactccccgggagcccaagaaaaagttcaagggaactcatcagacttattaccatgtcaaggagtttccttccttcatcacgagcctttggttgaaatacata

SEQ ID NO: 84665 - DNA, 249 bp, Glycine max
  Clone ID: 700955177H1
caaggatttggcgtccgaggaaagcttttgggacttgtacgagagatggaggagtcaccacacggtttcgcgaagcctcggtgacaagcacaagcggtttaacgtgtttaaagcaaatgtgatgcatgtccataacactaacaagatggataagccttacaagctgaaactaaacaagtttgctgacatgaccaaccatgaatttgagagtacctatgctggctcaaaggttaatcaccacagaatgtt

SEQ ID NO: 84666 - DNA, 254 bp, Glycine max
  Clone ID: 700955182H1
gttagtagagtcgtcttgcccgcagaccaaggtgctgaaagtacaatttggctaattgccaaggcatatgttgttgtcgatgactcctgctatcatcgactcatgagccactggttaaatactcatgctgtgattgaaccatttgtcgtagcaacagacaggcatcttagtgtgctccaccctatttataagattttgttgcctcactatcgtgacaccatgaacatcgatggactcgcaagacaatcactcat

SEQ ID NO: 84667 - DNA, 252 bp, Glycine max
  Clone ID: 700955183H1
ctcttcccttctatttgagtcacgccttcacactgtctctatcaccgatcccttatatcccccctccacttagcataccataattcaccgtcgatttccccattgatgatccatttggcatttcatcgtatttcgccacttgtcctactccacttggataatttcctaacgtatagttttcggaagtccttgttcttcatgagcttagtatttatgagtcctacgatttttggcgattcagcgacactatag

SEQ ID NO: 84668 - DNA, 248 bp, Glycine max
  Clone ID: 700955184H1
ctggaaagacatcttggaatatccttggaaatgctattgaaactggtcagaatatttggttcagtaatctattcaactgtatcagctacacaacctgttggtgtcgatatcgaggcagagaacaggctagagcgttgcaacctctgcttcacagagcttgaaaaagtcaaacgttttttaccttctctctcaagaagaggaggatcattgcaaaatctgcacaagagttgaatctggctttgcaggat

SEQ ID NO: 84669 - DNA, 245 bp, Glycine max
  Clone ID: 700955185H1
gttccacgttgttgttcgctctgtgtctctcactctctctatatttgcatcattcatcggaaatggctctcgaggttgctgttaaggctgctgttggggctccaaatgttctcggagattgtccattttcccaaagggtcctcttaactttggaggagaagaaaatcccttacgaactccacctcatcgatctcagtaacaaaccgaatggtttttgggtgtgaatcctgaagggaaggtgccat

SEQ ID NO: 84670 - DNA, 241 bp, Glycine max
  Clone ID: 700955188H1
cttcttctcttgcggctagggttttagcgcagttcttctagatttgaggaagatgggtaaggaaaaggttcacatcagtattgtggtcattggccatgtcgactctgggaaatccactaccactggtcacctgatttacaagcttggaggcattgacaagcgtgttattgagaggtttgagaaggaagctgctgagatgaacagaggtctttcaagtatgcctgggtgctggacaaactta

SEQ ID NO: 84671 - DNA, 244 bp, Glycine max
  Clone ID: 700955189H1
aactcgaagtgatccactccaggtgggccatgctcggagccttgggctgcgtcttcccggagttgctgtcccgcaacggggtgaagttcggagaagccgtgtggttcaaggccgggtcccagatcttcagcgagggtgggctcgactacttgggcaacccaagcctgatccacgcccagagcatcctcgccatctgggccacaaagttatcctaatgggtgccgttgaaggttaccgtattgct

SEQ ID NO: 84672 - DNA, 244 bp, Glycine max
  Clone ID: 700955190H1
cgaataatcaacaaaacactttctcagattcatatcccatcttctcttctcccacttcttaaaaccacggatggagagtgatagagatagagagaacgtgcttaacatagcaatggcaatggccaacaatgagagggagaagaagttcttctttgtagggtcactagtaaactacgcagctgaactaaagcttcttctcgcaatctcttccttctttgtggtgttgccactctccttcaattcc

SEQ ID NO: 84673 - DNA, 240 bp, Glycine max
  Clone ID: 700955191H1
tttttctcccttttcgctaacctcaaagagagttcagtatttatacaaataagagttttttctttttttatttctggttttcgttttggaatggctgggatttgctgtggagttgttggagaagccgccgagacttcttctcccatcgaacccacctcacgcccttccgcacgccggagtttggaccttttgcccttgaagtacatagctgctgacgtgtcagtcccgccgctggagaac

SEQ ID NO: 84674 - DNA, 244 bp, Glycine max
  Clone ID: 700955192H1
ctctcttccaacaacgattctaagcaacctcaccaacgtgtcgccgatgatgacgatgctatgccgcctcctattccgcctccttcgtccagtggcgacgaggtttccgatgacgtcatcaatcaggttgatcagttccttcgcgaactattcagaaccctcgcgaacggctttcaatcttgaggatggagcaagatgttgagaattttattcgtgatcctactcaacagcagcttgaatttaa

SEQ ID NO: 84675 - DNA, 248 bp, Glycine max
  Clone ID: 700955193H1
gcatggaaatgcaagagaatcgccatcattggcgtctcagccttattgttggtggctatggttgtggcaatcacagttggggacaatctcaatgagaatggttccaacaatgatccagaggacaacaagagaaatcgtgttgtctcgtctataaaagccgtccaaaccctttgtcatcccacaaattataagagagaatgcgaggaaagccttatagctggggctggaaataccacagatccaaaaga

SEQ ID NO: 84676 - DNA, 250 bp, Glycine max
  Clone ID: 700955194H1
cgctcagtcaggatgcacgctgagaaaaccggaaacaacgcctatctcaaccttatcccgctccttgttggcaatgtgggattgattttcaccaaaggtgacctgaaggaggtcagtgaggaggttgccaagtacaaggttggagctcctgctcgtgttggtttggttgccccaattgatgttgttgttcctcctggcaacacagggctcgatccctcccagacctctttcttccaggtgctcaactttc

SEQ ID NO: 84677 - DNA, 197 bp, Glycine max
  Clone ID: 700955195H1
cttggccttgcaatcttggagagaagggcttcaatctgaggcagccgaggccattgcaaatttgtctgtcaatgccaatgtggccaaagctgttgcagaagagggtgggattcagattcttgctggtttggctaggtcaatgaacaagctggtggcggaagaggctgctgggggattatggaatctctctgttggag

SEQ ID NO: 84678 - DNA, 256 bp, Glycine max
  Clone ID: 700955196H1
caaaactgttcactttgtcgaaggtttatctgccgatggagctgcttatcacaagaagtgcttcagatgcagccattgcaatggccttcttgcgataagcaattactcatccaccgaacgagttttgtactgcaaggtgcactttgagcagcttttcaaggaaactggaacctaccccaagaaatcccagtcgtctggaaagcctccagtcgagctgaatagagcaccaagcaagctttctgccttcttctctggg

SEQ ID NO: 84679 - DNA, 271 bp, Glycine max
  Clone ID: 700955201H1
caacaccaacacaaaatctcagaatgtgaatgtgaaagctgttgtgactattgaacaaagtgatggtggacttgtgccaaatctcattaattcagcggtagatgggatcaaagagttagctgggaaaacacttgttttggagcttgttagtgatgagcttgatccaaaaacaaatatagagaagaagacaccaaaaagttcggttcaaaatataggaaaaaaggaggatgagatacggtatgaggctcaatttgagttatccacggatttt

SEQ ID NO: 84680 - DNA, 263 bp, Glycine max
  Clone ID: 700955202H1
ttttcaaccactgaaaaggatgaactatacctcaatttggtacttgaatatgttcctgaaacagttaatcgtgtgatcaaacattacaacaagttaaaccacaggatgccgctgatatatgtgaaactctatacataccagatctttagggcgttatcttatattcatcgttgtattggagtctgccatcgggatatcaagcctcataatctactggtcaatccacacactcagcaggttaaattatgcgactttggaagtgc

SEQ ID NO: 84681 - DNA, 264 bp, Glycine max
  Clone ID: 700955203H1
cttagctgaaccctcacctcaatcttgcgtgctagctagctttattccaattcctacagaaccaaattattctgctagctagctagtacgtcaaataaaataaaataatcaaatatggcattcagcgggacccaacagaaatgcaaggcttgcgacaaaactgttcactttgtcgaaggtttatctgccgatggagctgcttatcacaagaactgcttcagatgcagccattgcaatggccttcttgcgataagcaattactca

SEQ ID NO: 84682 - DNA, 260 bp, Glycine max
  Clone ID: 700955204H1
gtgatttcagtgagtgatcggtgttcacttgatctcatcataatcgtcagcgtcaattgaagaagatgccgatcagaaacatcgccgtcggaaggcctgaagaggcgactcaccccgacacgttgaaggcggctttggctgagttcatctcaaccttcatcttcgtgttcgccggctcaggctccggcatcgcctacaacaagctcaccgacaacggcgctgccacccctgccggcctcatctccgcctccatcgcccat

SEQ ID NO: 84683 - DNA, 258 bp, Glycine max
  Clone ID: 700955205H1
cttcttctcttcgcgtagcgcgtcgtcccccgcaacgacgtcgtttcatggtcgcgttgttgttgtgctggttctctatgcgaaaatcttctgagggcttctcggcgatgagtggagtaattcattctctggtgtttgattccgcatttccatttttagatttctctgtctcccatgtgagaaatgtttgattggaacgacgaagagcttgctaacatagtatggggtgatgtgggtgagggtgatgatcatattgtg

SEQ ID NO: 84684 - DNA, 257 bp, Glycine max
  Clone ID: 700955206H1
aattcagaaatgttactgcaaacattagctatccctacaatactccttgtgatattcatatgggtggtacaaccaaagcaacgtcatgggaagattgcaccaggtcccaaggcgttgccaattattggtaacctccacatgctagggaaactcccgcaccgcacccttcaaacctttgcaagaaaatatggacccataatgtccttgaagctagggcaagtccaagccatagtggtttcctcccctgaaaccgctga

SEQ ID NO: 84685 - DNA, 257 bp, Glycine max
  Clone ID: 700955207H1
cgaaacaatggttttggttgccctattaaagctgtcttcacggtttccttcttgttcagagagaatcagggaaataattgttcagtgcaaagggaaccttgtattagaattgcagcaaagatccatagaattcaatttgattattgcaaagcatcaaaatattaggcctacacttgtagagaggatgccagttttggatgaggtgactttcattgctaggagggctggatcttttccaggtgcaggtttaacatcga

SEQ ID NO: 84686 - DNA, 258 bp, Glycine max
  Clone ID: 700955208H1
ttgaaattagaatagacggtgagaaagccaggcacacacaacacaggaacgggtgagtgagcgagtccccactccacactccaatcaatcaaccatttatttcaaaacaaaaccctagctagggttcgatccatcgatcatggcggacgaggtcccttctccttcagcagcatctactgctactgctcctcttggttcgagtgtgatctccctggtgaaccgccttcaggacatcttcgcccgcgtcggaagccaatc

SEQ ID NO: 84687 - DNA, 256 bp, Glycine max
  Clone ID: 700955209H1
gatgaatggcctcaaaacgctttgtcgtttgtggttattgagtcctgagtgatcttgtcatccgacctttgccatgacaggtgcgcttgcatggcaggtcaaaaaatgttaataaaaaaagttttattggtttggggagagatcgcacgggggttgcccggggtctcttcctcttgtgtggtgtggtgtttgctgtgctctccttttcgttatgcctactattattacctatctgtcgctccactccgtattacga

SEQ ID NO: 84688 - DNA, 256 bp, Glycine max
  Clone ID: 700955210H1
gaactcgctgactgaaactcgcaaaaattagggttttgcagtgatggcactgtccaaccgcgtccgatcgggaatctctctcttcaccaaatccacgttcctcacttccgagcgatccactctccaacgattcctcgttgccccttccatttccttcgcctccagaaattacgccaacgtgccggggcaaaaggaaaacaaagttaaggtccctctggctttgtttggaggttcaggaaactatgcctctgctttg

SEQ ID NO: 84689 - DNA, 254 bp, Glycine max
  Clone ID: 700955211H1
attcaaattgctatgacatgaagtctgcaaaaaatattaacttgaatgagatactttcaaatgcttcatccaacaacttagtttcccagtcaggtctgggaatcatggatggagaacagaagcatgaggagcagcttgcagtgttgccttggcttagagccaagacaacatgtaagaatgtggcacaaaatgctggaggtttaaatgttttccaagtttcttcttcatctaacaaagaagaaactggaaagggg

SEQ ID NO: 84690 - DNA, 256 bp, Glycine max
  Clone ID: 700955213H1
ggcgctactagaccatgatcccggtttgattaagacgtttgcgcagtcaaatgcaactcctctaatctctgcggctacacgagggcatgcagatgtcgttgaagagttgttgtctagggatcctactcagttggagatgactaggtccaacgggaaaaatgcgctacatttagctgcacgccagggacatgtgagtgttgtaaagatactactacggaaggatcaacaacttgctcgaaggactgataagaaagga

SEQ ID NO: 84691 - DNA, 257 bp, Glycine max
  Clone ID: 700955214H1
tttggctggagcataactcttatgtttatggatgcttctttggtacataacttgatctgtagataagattaggcatttagcatgtatggtgtgaagctcgtggtctttttagtggggtttcgtcaactgctaattattttggtttatttatacttgctaggtgaagtttttcagtgttaatgataaaaatgttccttgacgcagatttgatattccagttccttcaatcaagaattattttacatggtttaagtttt

SEQ ID NO: 84692 - DNA, 252 bp, Glycine max
  Clone ID: 700955215H1
ctaacatggaagcaagttaacactcccacaattccttaaccaaaaccactgatcaactcatccccacaatcagaaacgggtctctaccacaccacaaacgatcttctcaacatttccactatagagaagctagaattccacttcccatatcatgctgccaaatgacatcaccatcaccaattgatgatgatgaaaaatctaccctaagaggtgattggcgatctttacgaacaaaactggtggctggagaac

SEQ ID NO: 84693 - DNA, 262 bp, Glycine max
  Clone ID: 700955216H1
ctcatctgtatgcctatgcttgtttatcattttcttactttcctctcacgctctgccacaaaactccgtctccgcaataacggaataaaaaaacaagtttaattactattatggcgccgagggatcataagacaagcaacgctaaggctaacggtaacggtaacagcggggtgaaggaggtgcattttcgtggagtgagaaagaggccgtgggggagatacgccgcggagatcagagatcccggcaagaagagccgcgtctg

SEQ ID NO: 84694 - DNA, 266 bp, Glycine max
  Clone ID: 700955218H1
tggatgctgtgtggaagacaaccacaggattttggtatatggctatcttgagaacaacagcctagcacaaacacttattggttcaggccatagtagcatccaattaagttggcctgtaaggaggaacatttgcataggtgttgcccggggccttgcattccttcatgaggaggttcggccacgcattatccatagagacataaaagcaagcaatgtactacttgacaaagatctccagcccaaaatttcagattttggccttgcaa

SEQ ID NO: 84695 - DNA, 224 bp, Glycine max
  Clone ID: 700955220H1
ctaatttgtaatgtatggaaattgaactttattggagttgaccaacaactcactaccacatgagtcgtgtattaccttactcataactcgtttttatctgggaaatgtttgtttgtcttgtgttattatttggttataatgtgagtagttataggtactgtggtgagaaacttctatccacgctatacctatggataatttttttcttaaaaaaaaaacaaaaa

SEQ ID NO: 84696 - DNA, 257 bp, Glycine max
  Clone ID: 700955221H1
cccgaacctgaaccagaatcatcacgcgttccaggctcggccgccgtaccaccaccattaacaacagccgcagtatgtgcaggcatttgttgcagccgccgccgccgcagcagcagcagcagtggctgagaagggatgccaatgccgtcgacgaggtcgagaagaccgtgcagtccgaacccatggattcgagttcccaagattcgtaagcaagactaaagattccaccagctgatactcgctataggacagaggat

SEQ ID NO: 84697 - DNA, 256 bp, Glycine max
  Clone ID: 700955222H1
atgaaatgtttgattggaacgacgaagagctagctaacataatatggggtgaaggaggtgagagtgttgatcatattgtgccatatccagaggtaaatgaagatgttagcaacataaaagagtggaatcaagaagctgctgcgactaagctcaccaagctgaagaggccagaggctaaaactgattttcatgaaagaaagctaggaagcagttccaaccttgataatagtggagaactactaacctcaggatatgg

SEQ ID NO: 84698 - DNA, 257 bp, Glycine max
  Clone ID: 700955223H1
ccttccccttctccttacttctcactctctttccaaaacactccctttctctttccccttacccttcttctgtgtgtgatgatgtagatagagaataaaaagagaccagtgtgcagtgagaaagaggttggtcacttcttgtgtggctttgttttgttctttgtgttggaatttgttgatgggtgaagagggagaagaggtgtcaagagataaggaacagcaacacatgggagtttatggaaatgagtggttgttta

SEQ ID NO: 84699 - DNA, 257 bp, Glycine max
  Clone ID: 700955224H1
gcatcactgaactaacaaagcaaccctatgtcgaaggtggtttgtgtcaccggagccagcggcgccagcggatcatgggtggtcctactcctcctccagcgtggttacaccgtccatgccaccgtccaagatatcaaggatgaaaatgagacgaaacatttggaggaaatggaaggagcaaagagtcatctccatttttttgaaatggatcttcttgacatcgactccattgccgctgccataaagggttgttccgg

SEQ ID NO: 84700 - DNA, 254 bp, Glycine max
  Clone ID: 700955225H1
gcaaagatgacaggtgggatgtttggaaggaaggggcaaaagataaaggggacagtggtgttgatgccaaagaatgtgttggacttcaacgccataacctccgtcggaaaatgcagtgctaaggacaccgccaccgatttcttgggcaaaggcttggacgcattaggtcatgcagttgatgctctcactgccttcgctggccatagcatctccttgcagcttatcagtgctactcagactgatggtagtggaaa

SEQ ID NO: 84701 - DNA, 254 bp, Glycine max
  Clone ID: 700955227H1
gtttcatccacatatccccgtccatatgttatgagtcttccaggtggtacaagtaatgtgattcctgacagcagaaaatgggcaagtcaaagtctggatcttaattcgggccctggtggtatggatacagaacggagagatgatagattgccttcaggattgaggcaaatgtctgtccccaattcacaagcctcgatggaggaccacttgaagatgtttcagatggctggtgcattgaaaagaaaagaacctga

SEQ ID NO: 84702 - DNA, 259 bp, Glycine max
  Clone ID: 700955229H1
ttggtgtcttagctcaaacctcacctcaataatctttcgtgctagctagcttaatcatattccaattccaacagaaccaaattctgctagctagctagtacgtcaaaggaaataaaataatatggcattcagcgggacccaacagaaatgcaaggcttgcgacaaaactgttcacttggtcgaaggtttatctgtcgatggggctgcttatcacaagaattgcttcagatgcagccattgcaatggccttcttgcgata

SEQ ID NO: 84703 - DNA, 258 bp, Glycine max
  Clone ID: 700955230H1
cttctcttctcttctcttcgagggtacccctcctcgcagatccgatccgcacccttcactaaacccattattattgattattgattgataataacatttgggtttcattttcattccaagttgttgcatttttcaacatgtctttagctcactgctgaaccccttttctttctttctttgcccccttttgtccaaacccccaaaacaaaaacaaaaaaaatgatgatcaacaaaacgctttttctcacttatgtctac

SEQ ID NO: 84704 - DNA, 263 bp, Glycine max
  Clone ID: 700955232H1
tgcaatctctgaaccagacgttatctttgttcatcatcgcctcatatacacatacataccctttagaaagttctttgactcttcctagacatcgccactgcacttttgcgccacttcatagaactcaacaagctaggatttcctgttctgttgcaccaaatgaagtgcaggtgccaactgtgaaaacccaggatcccaagagtaagcctgagtgctatggtgtcttctgccttacctatgatttgagggctgaagaagagaca

SEQ ID NO: 84705 - DNA, 266 bp, Glycine max
  Clone ID: 700955233H1
gaacaagtgaaaaagttgtttaccaagttgtcaacggatcccactaccacatctcaattagttgctaaagagccagctatttttactggttctgaggttagaatgcttgatgatgatattcccctagcacaatatgctgtggcttttgaaggggcatcttggaaggatcccgattcaattcctctcatggtcatgcaagctattttgggttcttggaataagacagcaggaggtggaaaacacatgggttcggagttagcacagcg

SEQ ID NO: 84706 - DNA, 265 bp, Glycine max
  Clone ID: 700955234H1
gtcaattctatagagattgcaccatttcaggtaccatcgactttgtgttcggtaatgcactagctgtttttcaaaattgcactttcgtggtccgaaagccaatggagaaccaacaatgcattgtgactgcacaaggtagaaaagagatacaacaaccatctggaatagtaatccaagggggatccattgtgtctgatcctgaattctactcagtgagatttgagaacaaggcttacctagctcgtccatggaagaattactctag

SEQ ID NO: 84707 - DNA, 263 bp, Glycine max
  Clone ID: 700955235H1
tacactttcgagttcgaactaaagaaaaaacagtaaagaaagaagaagaaaaaaaaaaaagatggtttcgtcagtttcgtgggtgagaggcaagtgcgtcggtaagggcgcgtttggggttgtcaacgtggcggtttcgaaaagagataatcgcgttttcgcggtgaagtccgtggattgcggaagggggctttctggtcaggtggaggcgttggagaacgagattgggattctgaaacgagttacctcgccgcacgtggtgg

SEQ ID NO: 84708 - DNA, 256 bp, Glycine max
  Clone ID: 700955237H1
cttttatttgcgagtacaggtaaaagattcaggatcaggaattaatccacaagatatcccgaagttattcactaagtgtgcacaaaaccaatcattaacaagaaatcctgctggaagtggacttggcctggcaatttgtaggaggttcgtaaatcttatggaagggcatatttgggttgaaagcgaaggtattggtaaaggatgtacagtcacttttattgtaaaacttggaatcccagaccgatcaaatgaattt

SEQ ID NO: 84709 - DNA, 254 bp, Glycine max
  Clone ID: 700955238H1
cgagcttcctgatgggcaagttatcaccattggagctgagagattccgatgccctgaagttcttttccagccttctatgattggaatggaagctgctggaattcacgagaccacctacaactccatcatgaagtgtgatgtggatattaggaaggatctgtatggtaacattgttcttagtggtggctcaactatgttccctggtattgctgaccgtatgagcaaagaaatcactgcacttgctcctagcagca

SEQ ID NO: 84710 - DNA, 256 bp, Glycine max
  Clone ID: 700955239H1
tgcattcacgccatggactcactttaaccttctctcacactcaccgctgccaccaccgccttccaccatggactccgttccgtttcgcgatggtaacatacacaccattctcgactcccgttatcttcactctccactggatgttaatcatagtttgcacactcattcctcgctgattcggaggctttctcaagaaagggagttagagggccacactggctgtgtcaatgcggtggcttggaattccaaaggttcg

SEQ ID NO: 84711 - DNA, 255 bp, Glycine max
  Clone ID: 700955240H1
cgaggagaactggatcgattgaagaagagagtggaaaatggagctcgtatcagtatgtgggtggaaccggttctgtgaggccaacttcttcattggctggaactgaggtgagtgtggatgaaattcgatctgctgctgctgcttctggttactatcccccttcccttcatggagccttggttggttcacctgagcctgatcctacagagcaagctcttgtttatcagggtggatatggaggagattatggtggac

SEQ ID NO: 84712 - DNA, 245 bp, Glycine max
  Clone ID: 700955242H1
gaagaataaaaataaattttgtattgagaaaaaagtacaatttaatgttgattgcccttccaacttatgtacaaaaatataccctcagcatacggggtaaggtggcaaaatcaaattacaaaatttgtatgagcagaagaaacattcagtcctcacatgagaagaaaaggttgaccaccaaagcccgtgtaatttcacttctcttgtaaaattaaaagcaaaaacaatgtaaaatttggtcattt

SEQ ID NO: 84713 - DNA, 254 bp, Glycine max
  Clone ID: 700955244H1
gttaggtcgaatcttaatcctgtagctgatcgttttgtatccatgcttgctcagtgtggattttatcctctcctccataattttccaacaaaatctcaaacataataaataaaaattacatttttattcacaaaaatatcgggattcatcttgttctcattttgcccccttttttcttctgctctcccgaatcagaaaccctaatcattgtttgggatttcagaggaaagaaatttaaacagagcacgaagatg

SEQ ID NO: 84714 - DNA, 256 bp, Glycine max
  Clone ID: 700955245H1
ttggttcccctccaagcgttgcagctattgcagctgccactgtagctgctgcaactgcatggtgggcagctcatggattgcttcctttgtgtgctcctcttcatacttcttttgcctgttctcctgcatcggtgactgcagttccatcaatgaatacgggtgaagcaccggcactgaaggcagagcaagaaaagactactctacaaaatcctcctcttcaagatcagatgctggatccagaatactcggaagctca

SEQ ID NO: 84715 - DNA, 191 bp, Glycine max
  unsure (1)..(191): unsure at all n locations
  Clone ID: 700955246H1
ctttgagatgagagtcttgatgaacagtaccattctgatgtattgctttccttgaaagttaatgcatcagaatggtactgttcatcaagactctcacaaacactcacactctctctttcttctcttacctgctagctacaatattggagcctctgctgcttccactcaaactcaancaactgaatctctcc

SEQ ID NO: 84716 - DNA, 258 bp, Glycine max
  Clone ID: 700955247H1
ggaccattcaaattttacaccggattccctgtctattgtgttaggattgctcctcatgtgatgatgacatgcaatttctgtatctggttcaggaattgcagaaatcctacgggttgtagtttgtagttctccgtggtaacggatattttctgttgaattcaagctttttgagcatattgaataatttgttggctgggttgtagccctttttggcaactaaacaccaatggagctgatcattttttaagtttaattaat

SEQ ID NO: 84717 - DNA, 255 bp, Glycine max
  Clone ID: 700955248H1
ctcgagccgatgaatttgaatgctaagtctaacacaatcatttggttctctgttgttattagattaggtcatggtagagttatatcagttaaattgactatttagattcatccgtagttaatagttgccattgaagtggtgatttgatttgcttagttactgttcatttctatggcaggggttttcttttgagcagtttgttaaatatggtaaccattgagcattgcttagagattattctttagtcaaagaaac

SEQ ID NO: 84718 - DNA, 221 bp, Glycine max
  Clone ID: 700955249H1
ctcagactctcgcgcaacccccctctcgtggacgcgttgttgcagatcctcgttcgttctcgctctctcgcgtgagtttttgaatttgttggtctatgtgcaggaccagccccgaactcctgctcaatccctgtggatcagcttgcatcgatttatccctggaagaaagtaaacaaaatcctgtagaataagctctttgtggcttttaatttgattcgagg

SEQ ID NO: 84719 - DNA, 265 bp, Glycine max
  Clone ID: 700955250H1
gcaaaaccatggcgctaacggagttcttccacggcgagatctcgtcggagctatggaaaatgctggtttcaatttcccgaaaagccctccgctgcaagtcgagcgccgagagcctcatcacctacgtccgcgagctccttccgacgatcgaagagatcaaatattccggcgtggagctgccggcgccgcgccagtctcagctcgaccgcctctcggagatcctccgctccggcgtcgagctctcgcacaaggccctctcctcctc

SEQ ID NO: 84720 - DNA, 244 bp, Glycine max
  Clone ID: 700955252H1
ttctgtggctttgtttgtgggtgtctttatcttgaaaagagggtaaaggaagattgatgttcgtggaggttttaagtgatttcggaatggaatggtcgtaaaatgatggattgttatgacttatgagattgaggtcataggggcattggagatgattttaatgttgggttttggggcttctattggcacccaacatttttctctttgcattgctccttttttttttatataaatatctttattg

SEQ ID NO: 84721 - DNA, 76 bp, Glycine max
  Clone ID: 700955253H1
gttaagttccctccaaaccttgtggttccctgcgaagcaaagcaaaacttagcagtttgatttttggtcaccctcg

SEQ ID NO: 84722 - DNA, 254 bp, Glycine max
  Clone ID: 700955255H1
tgactataagagagcccgtcattttgaagttgatttgtctgctttccggaatgtacttgagatcgacaaagaacggatgattgcaagagttgagcccctagtcaacatgggtcagatcagcagggtgactgtacccatgaatctttcccttgctgtagttgcagagcttgatgatctaactgtcggtggtctcattaacggctatggtatagaaggaagctcccacaaatatggtttgttcgctgatactgttg

SEQ ID NO: 84723 - DNA, 251 bp, Glycine max
  Clone ID: 700955256H1
ctcaccacaaatccctccacgttatcaccaatcccaccgttggatctcgatccatccatcctttgtcaacctttccaaaaagtctttccttacaaagtgcttttccaaacttcttcttccttcctccttctctctctcaccctttctcccccactccctagtcagctagctcctgcaacaacaaccactcctcttctttttctcacccaaatccacgcttcccttacaccgcgtttggatctccgttatac

SEQ ID NO: 84724 - DNA, 254 bp, Glycine max
  Clone ID: 700955258H1
ggaagacgaaggtggtgtgaatgaagaagaaaaagaagaacaagagaaatcaggaacaacttctgcaagtcgccgaagatgaagtttcagcaggtggaaatacagaacaggccaaagatcctaatgatggagatataaatgatgtgagtgaattaagcgggaaagggaagacagcccattatgatgatcatcttacaccggcggagaggcgatacatagagcagagggagcaacttgatgttcacagattggct

SEQ ID NO: 84725 - DNA, 253 bp, Glycine max
  Clone ID: 700955259H1
atggagcaggaggtggaaggggatttgttggatgccagtgaccagcagccacttgaagatcaggaagaacatcatggtggggattcatcagattccagttctcttttgccctgcatgaactgggacaactcaattgcttgtctcagccactgttccaggtctgattatggctctctggcctcactgaataggagcttttggaacacaatccgaagtggtgagctgtacaggtggagaagactgaatggcataa

SEQ ID NO: 84726 - DNA, 251 bp, Glycine max
  Clone ID: 700955260H1
agaaactgattcttcatctcagtcttctatgagcagaagaggaagtcttaatcaggggtggtcacttgagtttaatggtaaggatgataaattggattccagatctcataatcaacttgccaggttttcttcaatggaatccttgaaacaagtggacagcagatcttcaaagaaaaacaaaaaattggaattcaacagtagccgtgtctcacctgctccaaatggtggttcccagtggggagcaatgaata

SEQ ID NO: 84727 - DNA, 255 bp, Glycine max
  Clone ID: 700955261H1
cgacaatgcattaggtgaaaaaggtgttagagcatttggagcacttttgaaatcgcagaaatgcttggaggagctttatctgatgaacgatggaatctcaaaggaagctgctcgagcagtttgcgagttgattcctttcacagagaaactcaaagttcttcattttcataataatatgactggagatgaaggggcactagctatagccgaggttgtgaagcgttctcctttgttggaagattttcgctgttcctc

SEQ ID NO: 84728 - DNA, 258 bp, Glycine max
  Clone ID: 700955262H1
cagggccattcccttcaagtccaagtgattcaatcaaacggttcatgcttaatcaagttgggaacaacaacaacaacaaaaatcaagccaatgtttgtgggttttggtttcatttcattaagatgatctgtttatctcttttcttctttttaaaatttaaagtctttgtattttgtatgtaaagatgtaaaattatgattattaggtggtgcatgtgtcgcgtcatgggccaatgttatcctctgcttttaagttgga

SEQ ID NO: 84729 - DNA, 267 bp, Glycine max
  Clone ID: 700955265H1
caagtccctcacaatggcggaatcgtgccttctatccctcccttccctcttctacgccaaaaacaataccctttctctctcaattcccaccaagcccctcaacctccatcttccatgctccaactcttcgctctttcccctcaccaccaaaacaacgcgccactcttctctcctcacattcgtggctcagacatcggattgggccaaagaagaagaggaagaagaaacctcgtgggagaaccaaggcgacaccgcgtggggaactga

SEQ ID NO: 84730 - DNA, 252 bp, Glycine max
  Clone ID: 700955266H1
gcaaagtcgatcatgtcctcgagcgacccaacgcagcgttttgtctcgccgcggctcggtgcacgctcgcactccgccaaggaatcacgcatcatcttctgcatggaaccgttatccgaagccttgaaaactggctgtcaactcatcaattttcgaaaccgaaaacggtaatttcgataggaatactccgggggaaaaacgacctttctgggagtgtatcttgtatgtcgggcatcggcatcaccgtcgctt

SEQ ID NO: 84731 - DNA, 261 bp, Glycine max
  Clone ID: 700955267H1
caaactctcacactgcctcttcctctcagattcagcaattttctattttctcctctcatggcttcagattccaaaaaggatttccctgctgatgacaaagctggaccagaagagagtaaaacatccaaagatgagacttcatctaaagattctccagcagaacaaagagcgacagctacttttggacctagacctggacctgctgggcatccaggcaacccttttgatctctcagcaatgtctggtctgctcaatgatcca

SEQ ID NO: 84732 - DNA, 255 bp, Glycine max
  Clone ID: 700955268H1
ctagaacgccgcttattatatcaggacctgcagagaaacccagtgatcgatattataaggctgcaaagattgcagaagcctttgaacgagacatacattacactgtagacgaaaaacaaaaatcagttctactttctgagcaaggttatgaagattctgaagaaattttagctgtcaaagatttatatgatcctcgagaacagtgggcttcatatatcctaaatgcaataaaagcaaaagaactatttcttcgag

SEQ ID NO: 84733 - DNA, 250 bp, Glycine max
  Clone ID: 700955270H1
gagaaacctcaactggttatattctattattgtagttcatgcagaaaatgacatttccttattacagaactcttacggtgtcatcttttgagttgaaatgcatgatggactccaattttgaagaactgaagtctgaaaccttcaagagatggggtacacaagtttatttttgtatttgtaattcataccttgacaggtttacttttgactgatccatttcatgctcaagtgtccattaaattctatagga

SEQ ID NO: 84734 - DNA, 249 bp, Glycine max
  Clone ID: 700955271H1
catttttcgataatatgagtgctatggataatattcaatacatatacaaaagtcgggtaggtcaactgcaagccttaaacaattcaaatggcccacttgttttagttggtaagacaggcatctattcttactgtttgtttgacactgcactagatgtttcaccgttataaacctaaatttttaaaatccttgtatgcataaattaactttatcctcttcttgatgaaaaattattaggtagttcaggac

SEQ ID NO: 84735 - DNA, 253 bp, Glycine max
  Clone ID: 700954616H1
actagttctagatcgcgagcggcaaagagggacttaggagtgcggtggattcgagaattccggagatgtatacagaggaagcttgcaaggtgttgagaacagcagtgctgtgcacggggactcttccggctttgagaccaaccatgagagctgtggttcaaaagcttgaggatgccgagccttgtaaattggttgggattgttattaccaaagatgacagtgaaaagaaaataggagtcaacgacaagtaatg

SEQ ID NO: 84736 - DNA, 258 bp, Glycine max
  Clone ID: 700954618H1
caaaagtgattttcgagaattagcgatgggaattgaaagaggaggcttcaagggattcaggagcgcctggagcgtgccgcccaagccgtgcgattcctgcaagctggcctcggcggcgcttttctgccgccccgattccgcgtttctctgcatcgcctgcgattccaacattcactgctcgtacaaactcgcgtcgcgccacgagcgcgtgtggatgtgtgaggtgtgcgagcaggcacccgctgctgtcacgtgcaa

SEQ ID NO: 84737 - DNA, 257 bp, Glycine max
  Clone ID: 700954619H1
cataagccaacttgagctgaattactactctaaaagctgcccaaaagctgaagagatcatcaaggaacaagtcacacaactatataacaagcatggaaacactgccgtttcgtgggtcagaaatctcttccacgattgcgtggttaagtcatgcgatgcatcattactgttagcgacggtgagcgatgtagtgtcggagcagacatcggatagaagttttgggatgagaaacttcaagtacgtaaacactatcaaag

SEQ ID NO: 84738 - DNA, 206 bp, Glycine max
  Clone ID: 700954621H1
gtctcatcactctccaaccacaatggctgtcttgggcggcgccgcctccgctcgcatcattccctccgtctcactctccacctcttctcgctccttcttctccttatcatcctcttccaaactcaaatgcttgcgctcctctcctcgcatttcgcacctctttctcaatcagcaaagagcggaggttcgcgtttcgagtggaggat

SEQ ID NO: 84739 - DNA, 254 bp, Glycine max
  Clone ID: 700954622H1
cttagatgctcagagtgactacactctatggaggttaaaggcttatgtaaaagattcactagaagagcaagtaaaggtcaatgcaggcgcaggtattaatcctaatgataaccctgatgacaagaaaaacaagaagaggcgagattctggtgattcttcgggcaagacaaacccaaaaaggaagaaactatctacattgtgattcattagttgcaacataagagacattagtttagtgtgattgagttaaagtt

SEQ ID NO: 84740 - DNA, 253 bp, Glycine max
  Clone ID: 700954624H1
gtcaagcgacgccgtttgggtcctcttccacctcgccttcttctcccaatgccttccctccgcctgggcccactcggcgatcctcctcccgggtcaactcgcccgtgactcaccgcagagctgccccgcccctgaccccaacctctactacaagccagtcatcggaatcgtcagccatcccggcgacggcgcctccggccgcctcagcaacgccaccggcgcctcctacatcgccgcctcctatgtcaaattc

SEQ ID NO: 84741 - DNA, 250 bp, Glycine max
  Clone ID: 700954625H1
gcttcgcactcgatccgttacgtttcccatgcgcgactgaatctaccataaccaaacgacgcgcaggtttcggaattgtgttctaggttttgagtttcggttccgatcgaccgacgatgctgtccaatcatttccaaaacggcatcgaaacggcgaggctcgtttggtcgcggattcctaattcggaagaatcgcagctcctcgacgacgccgttggcatccttaagaagaacgacggaggcggtgtcga

SEQ ID NO: 84742 - DNA, 202 bp, Glycine max
  Clone ID: 700954627H1
gagaaataaataacattacaaaacgctaaaccctaatcttctgcaattcgtgtgcgtggaaaggttcgagaatggtttcgctggaggaatctcgctctaattcgagccgtttccccttggcgaggagttaccagtaccactcctcggtttcgtccaaaacgcagcgtcacatcggaaggtccatgcgcacgatacgctccag

SEQ ID NO: 84743 - DNA, 250 bp, Glycine max
  Clone ID: 700954629H1
gaacttggtgctgctcgagtgaacaaggatggggcagatgtcaaagagctcaaagaacagatagcctgcctcaaagcagcattggcaagaaaggaaggtgaatcagaacattctttatcaggcagctctgaaaaatataggacaatggctagtgagctatcaccttatcatgcaaaccaacagggtgctgatattgtgagcccagggtgccggcaaccaatgcttgatgtaggcaatatagagcttcaca

SEQ ID NO: 84744 - DNA, 251 bp, Glycine max
  Clone ID: 700954630H1
gccgcgagggtcactacactgaactagtctgaaccaccatcaaaaccccattctcctcttcgcaatcaacctccaaatccaaattttctctctctgccttcacattccaatttcaaacaccatccgaatccaatccaatcaaaacaaactcgtctcttccagcgtttttgaaaaccctctcgatgccccgacccagacccattaattcatgagtcacgagatggaggcactggcagaaaacccaggtaggt

SEQ ID NO: 84745 - DNA, 250 bp, Glycine max
  Clone ID: 700954631H1
gttgaattgagcaagaagctctgcattaagcccgtgattgggcttcgtgcgaagcttagaaccaagcattctgggcatttcggtgggacttcaggagagaaggggaagtttgggctcaccaccgcacagattctgagggttgtgaagaagctggcccacgcaggcatgctggattgcttgcaactgctgcattttcatattggttctcagattccctcaaccgcgttgcttgctgatggcgtgggagagg

SEQ ID NO: 84746 - DNA, 259 bp, Glycine max
  Clone ID: 700954633H1
gagaacaacagttccatctatggttcgaccccaccaaggacttccacacatactccgtccacatggaatcctgcaagcatcatattctctgtggacgggaccccaataagggagttcaagaatttggagacaaaaggggttccattcccaaagagccaacccatgagaatatactctagtctttggaacgctgaggattgggccacaaggggtgggcttgtgaaaacggattggagcaaggccccattcacagcctcat

SEQ ID NO: 84747 - DNA, 256 bp, Glycine max
  Clone ID: 700954634H1
gtgctccaagagagattgaaactgagctgtcaactgctgacatcagctcacagtcgtttggagtgccaaacatgcctttcaagccaggttgctcaagtgatgttggcatcaatgatactggggttttaaataataataatggcttgcgggctaaccaaactccacgaatgcgaacatatactaaggttcaaaagcgtggctctgttggaagatgtattgatgttacccgttacaagggatatgatgaactccggca

SEQ ID NO: 84748 - DNA, 253 bp, Glycine max
  Clone ID: 700954636H1
caacaccatcacaccctccctcaggaggaggtgggtactataactcaccaccaacttatggaggtggtagccccccaacaccaatcactgtgagcccaccttcaaccccaattgaccccggcacccccactatcccctccacacccccttaccttccttccccaactcccttcacaggtacatgcaactactggaacactcacccaggaatcatttggggattgctaggctggtggggaaccttaggccatgc

SEQ ID NO: 84749 - DNA, 251 bp, Glycine max
  Clone ID: 700954638H1
caaaaaccctaggtagagagctcttcctccctttctcacagcaatggccgccgcagcacgccctctcgtcaccgtgcaggccctcgacggtgacatggcaaccgatgcctccgccaccgttcccatccctgacgtcatgaaggcctctatccgccccgacatcgtcaatttcgtacactcgaacatctccaagaacagccgccagccatacgccgtcagtcgtcgcgctggtcaccagacctccgccgaat

SEQ ID NO: 84750 - DNA, 61 bp, Glycine max
  Clone ID: 700954639H1
ctttatgctaatgtgcaaaaaggatttgacagagaattcaacacaaatcaataaaggtcag

SEQ ID NO: 84751 - DNA, 250 bp, Glycine max
  Clone ID: 700954641H1
tgtagggtgaaaccgtacctttcaaaccttatacccaccgttaccatgttccttataaagcatctcaaagtacttcacccttctggtattctatcaagagagcttcagcacacatcattgttttggcctcatattcagcatatggtaatgctagatatgtcttttgcatgatacatacttatgtagagaacactggctgattatatgatttcagatgaacatgattctgtttgtaataatttcaccttag

SEQ ID NO: 84752 - DNA, 245 bp, Glycine max
  Clone ID: 700954642H1
aaaacccaatccatatggaatttgatagaatcctacgtgggaagaatggcctaatttgtgagagtgttcttacggaatttaaggagttagtatcaatgtgtggagggcccaatgagaaactgagagctgactggttaataaattgtctcagggttgttcctgatactccctcagaacgcatgatgggcctcccatcaactaggaagctggcattgaaaaacaaggttgtctttggcactggtgac

SEQ ID NO: 84753 - DNA, 249 bp, Glycine max
  Clone ID: 700954643H1
tatcttccttgtcactgcccgtgtgtcgccgccatggccaccgtcaccacccaagcctccgccgcaattttccggccatgtacctcgaaatcgaggtttttgaccggctcttccggtaaacttaaccgggaagtgactatgcggccaatggggtgccctccttctgcctctttcaaggttgaagccaagaagggagagtggttacctggcttagcctccccaacttacctcaatggcactcttcctggt

SEQ ID NO: 84754 - DNA, 248 bp, Glycine max
  Clone ID: 700954647H1
gcaagaatggcacttcgttgcttggtgatgtccctttctgttctcttcactcttggtcttgcgagagaaagccatgccagagacgaagatttttggcatgctgtttggccaaacactcccattccaagttcattgcgagatcttctaaagcctggccctgcaagtgttgaaatcgatgatcaccctatgcaaattgaagaaacacagtacccgaaaaccttcttctataaagaagaccttcatccagg

SEQ ID NO: 84755 - DNA, 251 bp, Glycine max
  Clone ID: 700954648H1
gtgccacactagttttttttctacacatacatatatcacaagaaaaattaagcaacgattcaagaagaaaatgggttctgaacttgaagctcccattcacgtcctcatggtgtcctatccagcacaaggacacataaaccctttgctcagactaggtaagtgccttgctgcaaagggcttatttgtaaccttcaccacctcagagaccgctggtaaaaacatgcgaaccgccaataacatcactgacaaat

SEQ ID NO: 84756 - DNA, 204 bp, Glycine max
  Clone ID: 700954653H1
ttgctttgcagagtataagatcttgctcccacgtctctgattacttggaagcatcatctgcactcatggatcccaaccagcctgtgggtgaaaactacgccaatcccaggacttgcttctttcatgtcctcttcaaggctgcagccttggcattttacattctctcggccctctttattgataactttgtcatcattttcgtgg

SEQ ID NO: 84757 - DNA, 203 bp, Glycine max
  Clone ID: 700954654H1
gccagatctagaatgtggcctatcagaaaaagtagaagactttcctgccgatgaacctggcctttcaatggctttctgcccaaaacgaactttgtcgtccaaatcacggataagaagttccagctccttttctttctgttgtaatattgcatgtgtactggtttggtctccaccagcctcatccacagattccttgtttgaat

SEQ ID NO: 84758 - DNA, 250 bp, Glycine max
  Clone ID: 700954655H1
ctcgagccgcggctcctcccttccagataggggctcaaggcagttgggtcgacccaattcagagaatggtggagggcaggacgccaagaatctgagggtcaagcttgttctcttaggtgattctggtgttggtaaaagctgtattgttctacgatttgttcgtggtcagtttgatccaacatctaaggtaactgttggagcttcttttttgtcgcaaacaatagctctgcaagactctacaacagtcaag

SEQ ID NO: 84759 - DNA, 248 bp, Glycine max
  Clone ID: 700954656H1
cctcgagccgaatcggctcgagcaataattatcaaacctaaccagtaaaaatggtgaccgtgaaggaaatccgcaacgctcaacgttcccatggacccgccaccatcttggccttcggcaccgccacgccgtccaactgcgtctcccaagccgattaccctgactactacttccgcattaccaacagcgaacacatgactgatctcaaagaaaagttcaagcgcatgtgtgaaaagtccatgataaag

SEQ ID NO: 84760 - DNA, 248 bp, Glycine max
  Clone ID: 700954657H1
cttcttcttccttttttgtccctttgaaaagctaaggaattgctgaattggggtattacatgaaaccttctgcaagtggttcataagtttcctcttctctgttcttcttagaacaagtattctctgatgacccttttcattatccaacacgctactgtgttctgaccccatattccaaaggggtttttgtcttctgatcaaaagctcttttctttgttaaaatattggctagttgttattattgtgtt

SEQ ID NO: 84761 - DNA, 248 bp, Glycine max
  Clone ID: 700954658H1
ccttgctcttgtgctctgattggcctagccagtagtagccaatttgttggagctggttgggaatggcgtcgaaaccgaaatcaaatggaaattccaaatgcaacaaaggattcgctgacagctatatgctgttgaatcctgaagacgctcatttcttcgatcttgttcatgtgctgtattcccgtaacttgggaaaccgaaaatttgtggacagcaatgctgagggatcttatgagggaagcttccgc

SEQ ID NO: 84762 - DNA, 248 bp, Glycine max
  Clone ID: 700954659H1
cttagccgaggtcacgaggagcactagctagtttcacaatttccaaatggctaggggattgaagaagcatctcaagaggctcaatgctcctaagcattggatgcttgacaaactgggtggtgcatttgcgcccaaaccctcatctggaccacacaaatctagggagtgccttcccctgcatactcatcctacgaaaccggctaaagtatgctctgacttaccgtgaagtcatcgctattctgatgcag

SEQ ID NO: 84763 - DNA, 246 bp, Glycine max
  Clone ID: 700954660H1
gttgaacaaggaaagaaggaagaggttgttgtgtctgtcgtggtacttgagctgaggtaggttttttgtgttactgtggttgacttgggagattgtaagtgttggtggcggctattctgattggactgaattggaatcatggttgcgtgggtttgctatttttggggctgttggggggtgaagtaaggttaaatgattgtgagtgattccgttttgttgatttcgtactggtaactggaattttag

SEQ ID NO: 84764 - DNA, 247 bp, Glycine max
  Clone ID: 700954661H1
ctttaccaccattctagatatcagagaactttgcagctctcttaggtttttaaaaaacaccacgcaaacagcaagatggccacttccgacagtaacatgctactaaattatgttccagtttatgtgatgctcccactcggagttgtcaatgttgacaatgtttttgaagacccagatggccttaaagaacagctcttgcagcttcgagctgcgggtgttgacggggttatggttgatgtgtggtggg

SEQ ID NO: 84765 - DNA, 200 bp, Glycine max
  Clone ID: 700954662H1
tctcattctccccaaaacctctgctagtttttggttttgcttcaacaccctcgtcctccttcttcttcacactcccccagaaatcccaattttgcccctaccctcttccccaatttacctacgatgtacagcaacatgctggtcaactgctccaactgccgcacccctctgcagctgccacctggcgcgggatccatccg

SEQ ID NO: 84766 - DNA, 201 bp, Glycine max
  Clone ID: 700954663H1
cctatgcatattatgaagacggattcaattgcttcagtgaagctgagaattcaaaccttcaagggattttttgttaaaaagcagaaactggtttttgaagggaaggaattggctcgtaacagatcttgtatccgtgattatggtgttggtgatgggaatgttttgcacctggtgctgaggctttctgatctcaaagctatt

SEQ ID NO: 84767 - DNA, 251 bp, Glycine max
  Clone ID: 700954664H1
gtgaaaaagcaactaagcatagtgtgtaagaaagggagaaaaacaagtgctgtgtagagagaaaaatggctaggtggtgcatgatcttggtggttcttgctcttgccgtggttgcaagtgccagaaacatgcccaatgacgctggtttggaggaccagaagaacttccttgggtatgggttttcgggagttggcaacaatggccttccctttggtggagtgggttctgggtttgatggtaatatgggtggg

SEQ ID NO: 84768 - DNA, 254 bp, Glycine max
  Clone ID: 700954665H1
aataagatgaaaatgaaagtgcttgtcttgtttgttgctacagttttggtagcatatgaatgccatggctcagactaccagaagttccctctccaaatgaaaactgggtttggtgggcaatacagcaatgaggtggcatgtgccagttggaggcttggcgtggaagcaaacaacgtagtcaagtggcaaactgttcctgcagcttgcggagagtacatagctgactacgttctaggagaccaatatagatcaga

SEQ ID NO: 84769 - DNA, 252 bp, Glycine max
  Clone ID: 700954666H1
cacgcggcgacggctaatcgaatgaaacattttagattagatacgtagtgctgtagggaatccgaaaccggcacgcggagacgtcacgtgcgtcgtttaaccgtttgggaccgattcccagaagtttctcagaagtcagaggaaaacgatactttctaatcctttattcttcgctatcacttttttatttatattatatattcgttaaattggacttggactgtagctttgccattgagggtagtgttgaat

SEQ ID NO: 84770 - DNA, 254 bp, Glycine max
  Clone ID: 700954667H1
gagcagttccggggggaaccagcgaattgtcaaagaagaagacaaaggcttctcaaatttctcctttcaaacccaacaaggacctcctgcttcatccacagcaacatatcagtcttcaaatgtcacagttcaaacacaacagccatggagttatcaggagaccacaaagcaggataatttttcttcaggaaagagcatgatgaaaactgaaaaatcttcatccatgcaaagtttttcccctgagattgctagtg

SEQ ID NO: 84771 - DNA, 250 bp, Glycine max
  Clone ID: 700954669H1
caaagtttcttcctttctctgctctttgccttctctgacacatttggtgccttgtagagcgtgttttggcaggaaggtggtatggcgaaggacgttgaggttgctgagcgtggctccttctctgggaaggactaccaggaccctccaccagcaccactcattgatgctgaggagctcacaaagtggtccttttacagggctctcattgctgaattcattgccactttgctcttcctctacattactgtgc

SEQ ID NO: 84772 - DNA, 248 bp, Glycine max
  Clone ID: 700954670H1
atgagttgaaaatgaatggagaaaaaaagacgaagcggtgaagaagctgagcgaattgcaatatgaaattgaaagcggttccatggtggcataattggttagtggtaaaagcaggatcaagtcacagcagcctcatggtacgcaagaagcagactcaggattctgaatccactcctccaagaatcacatccaacgtcaaacaaaacctccgcttcctaaagctatggaagagcttccagaatagaaat

SEQ ID NO: 84773 - DNA, 73 bp, Glycine max
  Clone ID: 700954671H1
tggcaagcgccctttagaccccgatggggaggaagaaccccagtcaaggatggctaataggatagtggattct

SEQ ID NO: 84774 - DNA, 249 bp, Glycine max
  Clone ID: 700954672H1
actcgagccgattcggctcgaggggagaatatgaacatttggtttgaaaattaaccccgcggcacctgcaatgattattgtcaaaccaacaatagagaatccgactcaccccgttgtatttgccctttttttgtcttgaaaaggtgaagttcaagtcttcagttcaatccaagtctaactatagagtagctatctaagagctttggagctggttcttcttttggactgaaataaagattacctgttttt

SEQ ID NO: 84775 - DNA, 247 bp, Glycine max
  Clone ID: 700954674H1
ggattctcaaatactcaactcattagaccttatcttggccttattcctcttcatgattctgatcctaaaactagggagacgactcaagagtactgaattggctctaaacatatcccgaggaccatggaaactggctattataggaaatttactccagcttgttacatcgccaccacaccgaaaattaagagacctggccacaatatacggacccatgatgcatctccaacttggggagatcttcaca

SEQ ID NO: 84776 - DNA, 240 bp, Glycine max
  Clone ID: 700954675H1
ctccctccttaaaccctaccctaccctacccgtcgcccatggcttccgagaacgtaagcaccgatacggtgtcgaaagccgtcgacgctctcctgaaatggcgtcgctcccacatctgaaaccctaaaaccaaaactcttcgacgaagacgaggaatatgtgtacctgatcctgacgctgaagaagatcccttcaaaatcccgcgtgaagcctgcacaagatccctctcgccgactccct

SEQ ID NO: 84777 - DNA, 247 bp, Glycine max
  Clone ID: 700954676H1
gattaacacaccaacccactagaaacatgaaaacccctaacaaagcctcattactcttattccctctcttgtccctttccttatttatcaaccattcccatgcagcaggaatcgctgtgtactggggccaaaacggtggagaaggcaccttagcagaagcttgcaacacaggaaactaccaatatgtgaacatagccttcttgtccacttttggaaatggccaaaccccacaactcaaccttgctgg

SEQ ID NO: 84778 - DNA, 244 bp, Glycine max
  Clone ID: 700954678H1
ctccgagccggtgccggagcgcaaggtagccgttctcggcgccgcagcgggaccgggcagcctctctcccttctcatgaagctcaatcccctcgtttcgagcctctccctttacgatatcgccggaactcccggcgtcgcgccgatatcagccacataaacaccagatctgaggtagtggggtaccaaggtgatgaagagcttggaaaagctttggagggtgccgatgttgttataattcctgc

SEQ ID NO: 84779 - DNA, 247 bp, Glycine max
  Clone ID: 700954679H1
cagaactctctagaacctctctcacacaatagcaaagaagggaagactaaaactaaaaccccactctctttttccgagtcttccagtgaaagaaaggcagcgatggaagaagacttcgacatccccggcggcgaggaaatggatctcggcgaagacgaggtcggcgaggagagggagatcggctctggcggcctcaagaagaagctcctcaaggaaggtcaaggctgggaaacccccgaagtcggtg

SEQ ID NO: 84780 - DNA, 249 bp, Glycine max
  Clone ID: 700954680H1
attcacctgagctttttgtgaggattccaaagcatggcttcccttgcagcatccactgctgctgcttcccttggcatgtcagaaatgcttggaaaccccatcaacctcagtggtgccacaaggccagctccatctgcctctagccctgcctccttcaagactgtggctcttttctccaaaaagaaggctgcacctccaaaaaaagctgcagctgctgctcctgccaatgatgagcttgccaagtggtat

SEQ ID NO: 84781 - DNA, 251 bp, Glycine max
  Clone ID: 700954683H1
ggaaaatctccgaacccgctacttcctatcctttcaaaagagtgtgactgtaatagtgagctaaacaacatcggcagctagatcgtcgaagaaaacgaaaaagaaaagctttgaaaatggctcaggagtcactctcagaaacccccgatatctcgcccccttcgtctactgcacaatcgcagccagatccatctctttcaaggaacgtttcttttagccggctcaacgcacaggcaccagaatttgtgccc

SEQ ID NO: 84782 - DNA, 250 bp, Glycine max
  Clone ID: 700954684H1
cttcaacttcaacagcacttgatcacattcactgtctagtgatccaccttcacttcccgtttccaataatttaaatcacactctaatcagttctcaggattcctgtttgcatcatattcacaattggaacttcaaagtacaagcttttgagatttggaggttagctctttgcaaggaattgaattgttgcacctcattaccatctgtgacatctgaaattcaggtttcttagtattatttgagaccaaca

SEQ ID NO: 84783 - DNA, 250 bp, Glycine max
  Clone ID: 700954685H1
ctttgctgggagaagaagtctgagaattctgaaattgccatttggcaaaaaactctagacactgaatcatgtcgtagcagacaagaagaatctagtgtaaaattctgtgaatcgacagatgctaatgatgtctggtataagaaaatggaggtctgcgttactccaagtcctaaagtttctggtgattataagccatttccagagaggctatatgccatccctcctagaattgctagtggctctgttcctg

SEQ ID NO: 84784 - DNA, 248 bp, Glycine max
  Clone ID: 700954686H1
gggctttgagtcactttctatttccacaaaggaaagtgttcattcccagctacccttatataatccataattctctctctcctcttcctggtttggactttgtttaatcaagtggaccattagagttggtgaactcttcttttcctcacactacttagaaggtcaatgtcatggatgatggtcctgcaaaattaaaattcatccctgatcattttcaagttccaacatcaagtatagaatctcctgag

SEQ ID NO: 84785 - DNA, 248 bp, Glycine max
  Clone ID: 700954688H1
gtaaaagggaagacgaaggactaaagcaccagctggatgcacttcccccttcttcacataatgctgcacgtaacataaagatctttaccattttattatgatacaaaatagataatgttctgtatcaaatttcagtcagacattggctctgtacatagggttatattatcgatgcactgtatttgtattcaaattccaaatggcgaacatatttgattgctgttagttttcaaggttctgtagattat

SEQ ID NO: 84786 - DNA, 247 bp, Glycine max
  Clone ID: 700954689H1
tcctaagccaatagctttaaacaaacagagagacagagaaagcagtgaaagggtaatacatacacagaagaataagaagtagttgtagatgttttcgaaaccctgcacccaactctaacaagagaagaagccttcttcagttcatcaccaatggatccgtgtcccttcctgcgtcttatgatagactctctggctctcaatcttccctccgccaccaaaccgccacctgtctccggcgtccaccctt

SEQ ID NO: 84787 - DNA, 244 bp, Glycine max
  Clone ID: 700954690H1
gggtttgaagttttggcgctgaaaaaaaatggcggaagagtacgaagaggagggcggtgagattgaacaagagttctccgtttggaagaagaacactcctctcttgtacgatttcttcatttctcaccctcttcaatggccttctctcaccgttcactggcttccttcctctccccatccccactcccacccttccttcaatctccacaaacttcttctcgccactcacacttccgacggcgaa

SEQ ID NO: 84788 - DNA, 244 bp, Glycine max
  Clone ID: 700954692H1
atccgtcaacgcccttggggaaaatgggcagctgagattcgggatccaagaaagggggttcgtgtctggcttggaaccttcaacactgctgaagaagctgcaagagcttatgatgctgaagcacggaggattcgtggcaagaaagccaaggtgaattttcctgaggcaccaggtacttcttctgtaaaacgttccaaggtaaatccacaggaaaatcttaagactgttcagcccaatctgggtc

SEQ ID NO: 84789 - DNA, 223 bp, Glycine max
  Clone ID: 700954694H1
gttttgccattgtctgaggtatccaatttggtgagggatgttgacatctcatacaagagttcgaatcatctatccaattataatcttccacaagctgatcccatgcaatttctatgtaaccaattttcttcgctcagactgagggacataaattggaatcaatagtatactactcacctcacttaaattttgtttctgttacacaaatctctcctctgtttag

SEQ ID NO: 84790 - DNA, 262 bp, Glycine max
  Clone ID: 700954705H1
aagttactcaacaacacctcacgctctcggaaaatgctgcaggcatgaaaccattcattccaaccttcaactccttcttccaaacctctccttcacttgttagatttgttcacattgcaaagagatttttgttgctatggggttgatcgatctgaacaccacggaagatgatgaagctgctccattatctgcttcttctccagcttcatattcttcttcttcttctcactcggggataagcacttctgcttcaaccttggtt

SEQ ID NO: 84791 - DNA, 261 bp, Glycine max
  Clone ID: 700954706H1
caaccagtctggcaagggaaatggttaccaaatatggcatgggcaatgaagttggactagtcactcacgattacaaagatgatggtaggagcatgagctcagagactaggcttcttattgagaaagaggtgaagcaattcctggagagggcctacaacaatgcaaaaactattctgaccactcacaacaaggagcttcatgcacttgcaaatgcccttctggagcacgagacactttcaggaactcagataaagacattgc

SEQ ID NO: 84792 - DNA, 259 bp, Glycine max
  Clone ID: 700954708H1
cgcgtcgctccgcaccagtttcaccgcacgaatatcttgctgtgtggagcgatccgagaaaaactctgtaaacatgttggtttaccaggacctccttacaggtgatgagcttctctctgactccttccgttacaaggaaattgagaatggaatgctgtgggaagttgaggggaagtgggttgttaaaggagcagttgatgtagacattggtgcaaacccttctgctgagggtggaggagaagatgagggagttgatgat

SEQ ID NO: 84793 - DNA, 260 bp, Glycine max
  Clone ID: 700954709H1
caatggggagcacggcggtggagaagacggaggaagaactccgcaacgagatcgatgagcttcttcgccaacagcgcgagattacggagaggcttcgagatcctcgaggtcttcgcagaggttccttggcgggtcctgctctcccctctaacggtgctcgccaacgaccctttattcgtcctgttactggagacaggaatgattctgaagatcaacctcctgctaaacgtcgactttcatctgctgtcgttaaggtggat

SEQ ID NO: 84794 - DNA, 256 bp, Glycine max
  Clone ID: 700954710H1
atggcttagcagatgaagtacaagttatcagaattgttggttctgtggtagttatctgtgtactttggtgacactagttttgtccacaatggactttcttggcaaaatcccttggtttaatgctcaagtgaacacagatttggcgactaattcaattcctatcgaaacattcactgaacaacctaaacaagaacttgggaatgatcccaaattgcccttcctttcattgtttccttggggaaatcgtgctggagag

SEQ ID NO: 84795 - DNA, 256 bp, Glycine max
  Clone ID: 700954712H1
cacccagatctcaattttctgcaatttcactcagaccaggaaattaaccatggctcaacctgcaagcctcacaagaataggccttgctggcctggctgtgatgggccaaaaccttgctctcaacattgctgagaaaggctttcccatttctgtctacaaccggaccgcgtccaaggttgatgagacagttgaaagagcaaaacaagaaggaaaccttcctgtgtatggctaccataaccctaaattctttgtccaa

SEQ ID NO: 84796 - DNA, 254 bp, Glycine max
  Clone ID: 700954714H1
ggaaaaaactaccgtaatagtcctgccttgcgtaaagcttgcaaatttttgttgtcaaagcagcttcctaatggaggatggggtgagagttacttgtcaagccaaaacaaggtatatatattattgcttgaatagcacactagactctgaaaaaagaggtcagtgttaataaatttctatctacacaaatatatcggatgctttctttgccaaacaggtttacacaaatctaaaaggcaacagggcaaacttag

SEQ ID NO: 84797 - DNA, 255 bp, Glycine max
  unsure (1)..(255): unsure at all n locations
  Clone ID: 700954716H1
agaagggttcttcaattttctcgnttttttctttgtcgtggccgggttaaacttcaattaatgattatttggagtccaaaccttggcagctggcatcaataccggccaccaacaaagaaaaaaactaaacaatattatggcgaactgtcagcaatattattttcttttgctttctctggcaatttttattcctaccctgaatgccaattcctctgagaaagatgagtattggcagagccatgtctatgagtttga

SEQ ID NO: 84798 - DNA, 263 bp, Glycine max
  Clone ID: 700954718H1
cattgcttctgattggaagaagaatgagcacatgactgaggacatgttctgccatgaattccatcttgttgaccttagggtcatggataactgcttgacagttaccaagggtgtggaccatgttttcaatcttgctgctgatatgggtgggatgggttttatccagtccaaccactcagtcattatgtacaacaacaccatgattagcttcaacatgattgaggctgccaggatcaatggtgttaagaggtttttttatgcct

SEQ ID NO: 84799 - DNA, 262 bp, Glycine max
  Clone ID: 700954719H1
atttgaggccaggcaagccccactcaaccaccacacctctcctcgttcacgctacccctttctgctcttcttctacctttcaagttttaaaagtataaagatggcagagacattcctatttacctcagagtcggtgaacgagggacaccctgacaagctctgcgaccaaatctccgatgctgtcctcgacgcttgcctcgagcaggacccagacagcaaagttgcctgcgaaacatgcaccaaaaccaacttggtcatggtc

SEQ ID NO: 84800 - DNA, 262 bp, Glycine max
  Clone ID: 700954721H1
gcaactccaccacagttgcagaacagcacaaacacaagacagtgccaaggaaaaatactcagattcagcgttagtgtgtgattgtgaggctgttgagtgttgagtagggaagaaaagtgaagacctcaaaacaacgagctaaatcaggctcttgaggacaaccaagagaagaagaagagtgaagaagatgactggaatgacgaagaatcaaccgtcacagtggtggtggcttgatagccacaccacttctaatcgatcccct

SEQ ID NO: 84801 - DNA, 258 bp, Glycine max
  Clone ID: 700954722H1
attcatctggccttctgcttcctacgactgttcctcgttatactactgcatcagctgaaattgatgcatcagcaatgccaataggagagtctggattccagtctcctctatatccttgcgtgcaagattcatcagagttggtgcaaagtgcagggcaagtcgaccctcaaaaccagacacgaacattcgtcaaggtttacaaatcagggtcagtagggcgctcacttgacatctcccggttcagcagttatcatgagc

SEQ ID NO: 84802 - DNA, 259 bp, Glycine max
  Clone ID: 700954724H1
ctttgtatacaagatacgttatgatcaatacctctcctctttgtaggagactatagaccagatgctgtggaagtatctcccacaaagaggagaggtattgatcataactcattcatggtacattttcttatagactttatgatttttagaatttgtgggggaaaaaacttttcatataagaatgtggcctaaaacagtatgagttcaccaacaactcgttagtttgagtagaactgggctcggttcccttaaataagca

SEQ ID NO: 84803 - DNA, 260 bp, Glycine max
  Clone ID: 700954725H1
tgattattacattacactcatatctatcaccacttttaagaccgatatagtcatagtacaatggccctccccaccaatctcaagttcttctgtgtgtttctcctagtgcttattctctattcctcatccttccttgcatcagctgttgatcctaaggctgaagatgaagaatttaccttcgctgaaggaagtatcaaagggccaaagaattgggggcagatcaacccaaaatggaaagtatgtggagatggaaaactaca

SEQ ID NO: 84804 - DNA, 258 bp, Glycine max
  Clone ID: 700954726H1
ctatgatccaactccatcaccaccctcaggtggtggtggaagttacaatccaaccccatcaactcctccaagtggtggaagctatgatccaactccatcaccaccctcaggtactggtggaagttacaatccaactccatcaagtcctccagttggtggaagccatgatccaactccttcaccaccctcaggtggtggtggaagttacaatccaactccatcaactcccccaggtggtggaagctatgatccaacccc

SEQ ID NO: 84805 - DNA, 256 bp, Glycine max
  Clone ID: 700954729H1
gaaaaaagccactgagtgcgattcaataattgcgaaaaaccacggggagtgttgtttgtttcggtcccggctggaccagggaatgaatagagatgagaggctttcggcttaagaaaactgagttaagcggccaagccaaacgcagaatcggcggcagaaattgccaccggaagcacgtcgaagacgggtgaactaaaaagaagaatctcatccaccacttatcctttcaatgccccaaccccaaaaaaatcacaac

SEQ ID NO: 84806 - DNA, 257 bp, Glycine max
  Clone ID: 700954731H1
cttggttttaattggtataggcgtgccaaggtcttgttaattttgagcgttaagtgctgcaactaatcagatcccaagaccttggcctaccttgccatacagaaaaaaaaaaagcaaaaaaaaagccaaggtttggagccaacaaaaataaacacaaagcacaagtcatggaaagacataatggttggaagtgcaacaaaggttgctttcaccctcttggccactttcgccattgtcattccatgccttgaggctgg

SEQ ID NO: 84807 - DNA, 82 bp, Glycine max
  Clone ID: 700954732H1
ctcgtgccagttctatctctttctcctccagaataattggagttatgtaaagttatcatcttttcactaaattggtttctgg

SEQ ID NO: 84808 - DNA, 265 bp, Glycine max
  Clone ID: 700954734H1
cacagatatattttttttttttgtctccatcattttctcgagagctttcagtttgtgtggttcatcttccttcttctccttccctcccccctctgtaaaaccccgcttctctgaatccctttctgttaatcatctgtctttcaagctaagattttcgggtttgtctattaattcaccaagaagcaaacttagaaggatttttcgaaagccaggtgttttcagaaacgagatccaggttttattgtcgaatttcgctagtcaaatt

SEQ ID NO: 84809 - DNA, 261 bp, Glycine max
  Clone ID: 700954735H1
tggcagtgtctcttccctggcttggtttatgtcaaatcaagaaacaagctttgtcacaattggtcaaagagttcttgcaagaccactgaaggtgcgattccactatggtcatccagatgtttttgatagaatttttcacataactcgaggaggaatcagcaaggcatcttgtggcatcaatctgagcgaggatatttttgctggattcaactcaacactaagacgcggaaatattactcatcatgaatatatccaatgcgg

SEQ ID NO: 84810 - DNA, 260 bp, Glycine max
  Clone ID: 700954736H1
tagcgggtgaaggtttttgcgccgcgccttatatcacaccgtcgtccgaaagcgtcgttgccgtgaaaccctagaaagaaacgacgacgtaaatggaggtggagcccgtggagccgcagtcgctgaagaagctaagcttcaagtctctgaagcgcgctctcgatctcttctctcccatccacggacacctcgctactcccgatgccgaaagcaagaaaatacgcactagccacaaggtgagcgtggagtatggtggaatc

SEQ ID NO: 84811 - DNA, 260 bp, Glycine max
  Clone ID: 700954737H1
ttactccacagaggaaatacaatctgatctggctgttgttgcaggatcgccgtcacaagttacagaagatgataagcatcagtcaatgatccctgcacactctgaggaagcaatatccaatgttgtaaccccggttgatcgccgtactgatggatatgatgcttgtgatgcacaaaatcaaattgagttaccaactgcggaggagtttcaaccattgaactttgatatatattatgacccaagaagcgagctactggatg

SEQ ID NO: 84812 - DNA, 256 bp, Glycine max
  Clone ID: 700954739H1
aacaagacaagcacaacaagcattctgaaattctcttatttgttagtatcaggactagtaacaattaaccttgaaaataaagcttcatctagttttatcttccataggtagaaaagtgatcaagagaatacacaagtcaccaggtgggaatgtaccatcatcaccaacaccaaggaaaaaacattcattcttcttccagaatgccaatcccctctgagaggcacatgttccttcaaacaggaaatggatctggtga

SEQ ID NO: 84813 - DNA, 257 bp, Glycine max
  Clone ID: 700954740H1
gataactagaaacagtgtgatgaaaatgaaggtccttgttttcttcgttgctacaattttggtagcatggcaatgccatgcgtacgatatgttccctctccgaatgaacactggctatggtgcccgtactccggaggtgaaatgcgcaagttggaggcttgctgtggaagcacacaacatctttggctttgagaccattcctgaagagtgcgttgaagcaacaaaggaatacatccatggcgaacaatatagatcag

SEQ ID NO: 84814 - DNA, 258 bp, Glycine max
  Clone ID: 700954741H1
agaagatgaaaggagagcaagaattagaagatgaagaaagcttctcgcgtgctatgctgctttgcagctccgttgtggtttccatggcgctgcaatcggcaacggagctgggcgtatttgacgtgttgcaagaagcgggggctaagctctctgcgaaagagatagcatccaagctttcctgcgacaacaaccctgaagcagactcaatgctggatcgccttctagcccttctagcctctcactccattcttaactgtt

SEQ ID NO: 84815 - DNA, 256 bp, Glycine max
  Clone ID: 700954742H1
acagcatcgacttgaatttgagtgatgaatttgttgttgaagcttcactttggaaattttgaatgttacgagacacaagtttctccaacttgctgggtcccacacagtttcttcctctgtctatttccctcgcagatctcaaccaattcttatatataaacccctttcgagatctgcttcaagctctgtccccttcttccacttccaccctcctctcaggtttttgtggataagagtgagctataatggctgccag

SEQ ID NO: 84816 - DNA, 254 bp, Glycine max
  Clone ID: 700954743H1
cttctgctctctcattacgctctttcctccgatctcaggtgttgtataagcttcctgtgttggcttggtatccttgcaagttcttctgtagcagattccaaggtgaaggtgtcacgttaaagtttctttcatgtttgaacaggctactatccatttgggagcaactgagctgcttggattgtatttttcttcttctagaaaaaattacagaccctcaccacccagacttagttgtatgaacggttggccacctt

SEQ ID NO: 84817 - DNA, 255 bp, Glycine max
  Clone ID: 700954744H1
tcctctttttttcatttctcttcaacttcctcttctttcaattctcttcagtctctctccgccttcccaaaatggtgaaccctagatgcttcctcgacgtcagcatcggcggcgagttagaaggccggatcgttgtggagctcttccacgacgtcgttcccaaaactgccgagaatttccgcgccctctgcaccggcgaaaagggcatcggtcccaacaccggcgtccccctccactacaaaggcgtgtgtttca

SEQ ID NO: 84818 - DNA, 253 bp, Glycine max
  Clone ID: 700954747H1
tggatgaagcaatgaaagtgagagagtccaattatgcgaacgctttgtgatgcttgtgagagtgcggcggctatagttttctgcgccgctgatgaggctgcactttgtcgtgcctgtgatgagaaggttcacatgtgcaataagctagctagtaggcatgtgagggttggtcttgcaagtccaagtgatgtgccacggtgtgacatatgtgagaatgcaccagctttcttctattgcgagacagatggaagtt

SEQ ID NO: 84819 - DNA, 266 bp, Glycine max
  unsure (1)..(266): unsure at all n locations
  Clone ID: 700954749H1
gccatggcgcttcaaccaattccgttaaattgttcttcttccacaccgcgtagctattcctnctgtgcatattctcaaattcagagtttctggtgcgaaccagacatcggaacttgacactccacaacgagtgaaggtagcggagaagacacaaaacagcagccacaggccaagcttccttcatcaaattcgagatagatggtcactcaaattagggtcccaaagggagaagttcccatggcaagaacgggaacacgaggtggtcc

SEQ ID NO: 84820 - DNA, 261 bp, Glycine max
  Clone ID: 700954751H1
attgctccaactatggccgtggacctcatgacgaccggttacacccgaaacgacaacatcagtagtttcacaaccaaagccgaggaaaatgccgtccaagaagccgcttctggtctagagagcgtcgagaagctcatcagactcctctcccaaacccaagcccaagcccaagcccaccatcaattcaacaacaacaatagctctagtaatgaaatcgccatcgccatggactgcaaagccgtcgctgacgtggcagtctcc

SEQ ID NO: 84821 - DNA, 259 bp, Glycine max
  Clone ID: 700954752H1
attcaaccttcctcgcctttgcctccgtttccgtgactgagatggctggaggtgttattcagcagatattgaggaggaaactccaccctcggtttactaactctcccttgttgtcacccatcgtagcaaaaaaagatgatgctggctctactggcagtcagtccttaagagcacttgcattaattggagctggtttgtcaggtcttttcagtttttcaacaatggcagcagctgatgaagctgaacatggcctggcatg

SEQ ID NO: 84822 - DNA, 260 bp, Glycine max
  Clone ID: 700954753H1
aaaatactacaaatttttttcagtttctccgccgccgcacaaccaccacctcctccgttcggatctccggcggacctactatccctactactactctactctatttacacggaagaacaaaaaactatccccctcccccaaaaaaaaccccaaagcggctcggttagggtttagttttgtaccatttcgtgtaatctaatttttcatccgtaaaaatctaattttgaggcggcgagatggcggagattcaggtgcagcat

SEQ ID NO: 84823 - DNA, 257 bp, Glycine max
  Clone ID: 700954755H1
agttatgttgcatatgctttgaccaagcatgcacaattgaggtaagaccctgtggccatcaaatgtgtgctcattgcaccctagcgctatgctgtcacaaaaagcttgatcctgctactaccggcctttctggaccagtttgtccattttgccgtggatccattcttcaattactggttgctaagattaacaaaatcagtgatacagaagtggaatctagccctatgaagccaaggagatcacggaaatcaaatttc

SEQ ID NO: 84824 - DNA, 258 bp, Glycine max
  Clone ID: 700954756H1
gtcgggagatccatacaagacattgtttgtggctaaactcagttacgagaccactgagagcagaatcaaaagggagtttgagtcatatggtccaatcaaacgggttcgattagttgctgacaaagatataaataagcccaggggttatgctttcattgagtatctgcatacaagagacatgaaagctgcttataaacaagctgatggtaggaaaattgatggtagaagggtgcttgtggatgttgagcgtgggaggac

SEQ ID NO: 84825 - DNA, 256 bp, Glycine max
  Clone ID: 700954758H1
gaagccgcaaaacaagcttacaagccgaaccccatgaaagttaccgctgagttcaatacacatgtcatcagggcaatgagaggctccaacaactcaagaaggggcttatcaaaccaatacgatggtccatgcaaggcgacaaaccccattgacaaatgttggagatgtgaccccaattgggagaaaaaccgcaagaggctagcagattgtgccctaggctttggccatggcacaacagggggcaaagatggcaaaa

SEQ ID NO: 84826 - DNA, 252 bp, Glycine max
  Clone ID: 700954760H1
aacccgtgtgtttggatgagttggccacgcaaacccaacagctaattttcgttgcacttcgtttcctcttcctgtataacatttataacctgatgcattttcacaatattcaatttcacttcatcccttgtgtttcatcttcttatgtgtctattcattttcctcagaatttccggttttgttgaatatcacaaagcttcaatctcatggcctcgtttgatgaacaacaaggaaagcctttacccaagtttg

SEQ ID NO: 84827 - DNA, 253 bp, Glycine max
  Clone ID: 700954761H1
caccaatctcacccatttcaaaaaaaggccgttagtgttactattcgtacaatggccactcttgttctttaccaattctttctcaaactcttgctcctaatttcagtctttcagctttcctttgctgctaggagactcaaccagctggttcaggaccagtcacagttactccattaccacaacggtcctcttctatacggcaaaatcgccgtgaacctaatctggtatggtcacttcaaaccatcccaaaagg

SEQ ID NO: 84828 - DNA, 253 bp, Glycine max
  Clone ID: 700954763H1
caatatattccattctctctgtgtatttccctacctctcccttcaagatgcagatcttcgtcaagaccctcaccggcaagaccatcacccttgaggtggaaagctctgacaccatcgacaacgtcaaggccaagatccaggacaaggaaggaatccccccggaccagcaacgtctcattttcgccggaaagcaacttgaggacggccgtacccttgctgactacaacattcagaaggagagtactcttcacct

SEQ ID NO: 84829 - DNA, 53 bp, Glycine max
  Clone ID: 700954764H1
gccactcctccacccctcgccgcaccaacggcgtcaccgtcctcgtcaccggc

SEQ ID NO: 84830 - DNA, 260 bp, Glycine max
  Clone ID: 700954766H1
ctttccaaactctcttcttcccttccaagacccttttgaagcaaccgatggaatttcagtttcttcccagattctaccttcttgtttccttatccattctgttccttgcaccctttcacgctcaagctaaaattaaagtgacttactgcgataagaaggcagactatgctgtgaaggtgtctggagttgaaatatcaccaaaccctgtggtgagtggccaggcggctacctttaagatctcagcaacttctggtaaagct

SEQ ID NO: 84831 - DNA, 258 bp, Glycine max
  Clone ID: 700954767H1
agaggaaaggaaaagtggcaaaaaaagcgagtcatttattagagtcgcgagctagaaaattcttcttagaccaaattgctaagaaaattgactcaagtaatggtagggagaggcggaagggtctaaagatgttgagaaatgtgacaaatggtttcattgatgtgtatgaaggtgggagttctgatggtctacctggtttgcaaatttatacattgctgatgaattcaactgatacacagcacgagattttgcatgaac

SEQ ID NO: 84832 - DNA, 258 bp, Glycine max
  Clone ID: 700954768H1
ctcacaaacacacactgaactaaaaaacatcaaaagagacatggctgagcaaaccttcatcatgatcaagcctgatggcgtccaaagaggccttattggcgagatcattagcagatttgagaagaaaggtttctacttgaaaggtttgaaacttgttactgtggaccgtccttttgctgagaagcactatgctgatttgtctgccaagcctttctttagtggtttggtggattacattatctctggccctgttgttgc

SEQ ID NO: 84833 - DNA, 252 bp, Glycine max
  Clone ID: 700954770H1
tcatggtgcaaggatatgatccagttataaaagttcttgcaaaagatattgacatacgcttgaaccacagggtgaaaaagatatctagtggttacaacaaggtaatggtgacggtcgaggatggcaggaactttgttgctgatgctgctatcataactgttcctattggaatcctaaaagcgaatttgattgaatttgaaccaaaacttcctgattggaaggtttcagcaatttcagatcttggtgtgggca

SEQ ID NO: 84834 - DNA, 254 bp, Glycine max
  Clone ID: 700954771H1
aacactattcttcttcgcagcaatggcgcgagtggatctggacgggaaccccatgaaggcacttacgatctgcatgatcggcgctggcggcttcataggctcgcatctctgcgagaagctcatgtccgaaacccctcacaccgtcctcgccctcgacgtctacaacgacaagatcaaacacctcctcgaaccctccgattccccctgggccggccgcatcaccttccaccgcctcaacatcaaacacgactctc

SEQ ID NO: 84835 - DNA, 256 bp, Glycine max
  Clone ID: 700954773H1
acacaatctcatagcaccaaaaacatagtactatacagccccactttctctttctctttctcttcactctaaagtctaagcatccatggccatggcgtctgcaaagctcaacaccttgtcttcccagtggatcgcccacaattccttctctcctcgccgtggatcctcttctcgccgagtctctcttccgatccgcgcttcttcttaccaacacgaactcgtccaaaccgccaaatctattgcatctcccggtcgt

SEQ ID NO: 84836 - DNA, 85 bp, Glycine max
  Clone ID: 700954774H1
gaactagtctcctactctcacccggaagaaaaaaatggcgtctcacatcgttgggtacccccgtatgggtcccaagagagagctc

SEQ ID NO: 84837 - DNA, 250 bp, Glycine max
  Clone ID: 700954776H1
aattcaacttaagagatcaatatggccaccaccactacccagcctcctctaatatctgttttttccttctgttgttgcttctagcacactttcatttgggcataagccaacttgagctgaattactactctaaaagctgcccaaaagctgaagagatcatcaaggaacaagtcacacaactatataacaagcatggaaacactgccgtttcgtgggtcagaaatctcttccacgattgcgtggttaagtc

SEQ ID NO: 84838 - DNA, 250 bp, Glycine max
  Clone ID: 700954777H1
gtttcctaggaccatgtccagtgttgctgcttccctttctggactgggaatggctgcaggaaacttggtgtctagttttgtcttcagcgttgtacaaaatgctacttcaagaggggggaaagaaggttgggttttggataacattaacaagggtcgttatgacaagtactactgggttatttctggactcagtgctcttaatatagtgtattatctaatatgcagttgggcttatggacctaccgttgag

SEQ ID NO: 84839 - DNA, 247 bp, Glycine max
  Clone ID: 700954778H1
cttcccctatggctcgtcactccttgctcttagccctcctcctcttcgccgccgtggccaccgccgcgatggcggtggccgcgtccgacgccgacgacatcctgatccgtcaggtggtgccagatgttggcgaaccgaagaggaggacaacctgctgaacgccgagcaccacttcgcgagcttcaaggccaaactcgccaagacctacgccaccaaggaggagcacgatcatcgcttcggcgtcttc

SEQ ID NO: 84840 - DNA, 224 bp, Glycine max
  Clone ID: 700954779H1
tttcactgcgttatataaaaaggcgtggctttggtcggaagtaaagggcagaaaggtgtatatataatatcatatcaaagcatcaatcaaataaatggcaactgaacatgaagacgatttcaaggatgagaagaatccccgccccctcgacgaggatgacatcgcccttctcaaaacctatggtttggggccttattccaccagcataaaaaaagccgagaagg

SEQ ID NO: 84841 - DNA, 251 bp, Glycine max
  Clone ID: 700954780H1
ctcgtgccagttctatctctttctcctccaaaataattggagttatgtaaagttatcatcttttctctaaattggtttctgggtaatccttgttcatagcttttggattttcccatcaagcctccttttttgttgctagggcttcaaccacacattggtggcagtgctgatttatcactatttttattaagctatgaactctccaattcatgccccttcttcatcggcatcttcttcctcctatatgcttc

SEQ ID NO: 84842 - DNA, 264 bp, Glycine max
  Clone ID: 700954781H1
cattattgttaacattgttattactgtcctcagttttctcaattgcctcatcaagaagaagacattccaacaacagcaacatagattggtggtgcaaccaaaccccataccccgagccatgcagatactacataaaacacagccactaccaacacaaacaactcaaacacaaatccgaattccgcacaattctagttcccttggccttggagagagcagtgatcatgcgaaggaaagcacgtgagttggggggaaacggtgtca

SEQ ID NO: 84843 - DNA, 260 bp, Glycine max
  Clone ID: 700954782H1
ctggaggcgcatgacatgatatctctctcttctccaacctctctcatatatgtaaagacaaaaccaaaaccgtgtttatgcttcagcccttcatcatatagatctgcctgaaaaaaacccttgcgatcagatccagcccaattaatctctctctctagaatgtcttcccagcgcgcagatctagagtgccggatcttcccggagcccgaaatcgaccacttcgaccggctaccggactcgctcctccttttggttttcaa

SEQ ID NO: 84844 - DNA, 258 bp, Glycine max
  unsure (1)..(258): unsure at all n locations
  Clone ID: 700954783H1
cacgtgtcaagcccaatgttgtggttgcccaggatggcactggtcagttcaaaaccgttgccgatgctattgcttcctacccaaaggataacaaaggtagatacattatctacgttaaggctggtgtctatgacgagtacatcaccgttcccaagagttcaaagaacattctcatgtacggtgatggccctgctaagaccatcatcaccggtcgcaagaacttcgtcgatggtgtcaagaccatgcaaactgncactt

SEQ ID NO: 84845 - DNA, 256 bp, Glycine max
  Clone ID: 700954787H1
gttgaatcgcgtctaataagcaggttctgagatttataagctttcatctcagacagggtgtacataatatctgatggatataagtactctcaatgctgtacagattactgtgctgggatccgcgttttgtgttatgctttccatgcatttcacgacgcagttaatgtctcagcatctcttctattggaagtgtccgccagagctagaggctattatcattatcatccttatggctcctatctatggagctgtctcc

SEQ ID NO: 84846 - DNA, 256 bp, Glycine max
  Clone ID: 700954788H1
gctagaagcaataagatgataatgaaagtgcttgctttgtatgttgctacagtcttggtagcatatgaatgccatggctcagactaccagaagttccctctccagatgaaaactgggtttggtgggcaatacagcaatgaggtggcatgtgccagttggaggcttgacgtggaagcaaacaacgtagtcaagtggcaaactgttcctgcagcttgcggagagtacatagctgactacgttctatgataccaatata

SEQ ID NO: 84847 - DNA, 252 bp, Glycine max
  Clone ID: 700954790H1
cctcagcagcctaccgacactgaaaaccagagaaaagaaaagcaccttttttccgccattattgacccttcttgaaaactggtcatcaatggtgatgaaggactcatcttgacaccaccccacttccaaattgatttggattagttgtgttggacttggatgctgctgctcatacagttgatccacaaatgagattccaccttgcattgtttctctttttggcttctcttcaagccactttaagtcaagata

SEQ ID NO: 84848 - DNA, 253 bp, Glycine max
  Clone ID: 700954791H1
cttttctaaccgccacttcatcacggcaagcatatgccttctaatattctaggaaaccttcgctaataaattcccctcttaaccccctccccccctttttttgtaccttcatcatcatcatatttcatatcacaccaacccattttaatttgcatttgatcttcttcatagacatatatacactatcataatattagtttcttccttaaattttggttgtttttaacgttatgaagtttgggaagagactcaa

SEQ ID NO: 84849 - DNA, 252 bp, Glycine max
  Clone ID: 700954792H1
ggattggtgtggatgaaggacaatgtgatggttgcataaaatctggtgggagatgtggacacaacgtatctaaggatgcatttacgtgcctctgtcctaatcagcaatcttatgatgaggtttgtagcaaaagccaaacaagttctcccttagcagcaccaacgcctaaaccaacaccagaacaggaactgtcacccccttttggtccaaaatttcaagaaaagtctccacatgctccgaatccgcggaagt

SEQ ID NO: 84850 - DNA, 252 bp, Glycine max
  Clone ID: 700954794H1
ctccccggtatctgccgcagccaacatccaaagtccaacaaacatttggcggagtttacaacaaaactcttcaaaacccacatccaaatcgtcgtaaagttcaaatctttgatacctcatttcgatttagacctatattgttcccagcaacaggcttccattaacttctctctgcggcgatggtcttgaagtcaatggttgcttccgcgagcgatctaagtctcgtgtctgttgcagggaactctccccttg

SEQ ID NO: 84851 - DNA, 271 bp, Glycine max
  Clone ID: 700954801H1
aatgaaaccaattctcactcctcaaatctcaaacaccctctccaacccctctacatgaaaacctgtcaccaccacttcacagcctttccttcactcagttcacaccagcaagcccgaaaatggtgctgacatgctcattcaagctctccaacgccatggtggtgggattaccaatgtctttgcctactcgggcggttgctccatagatatccatcaagcgctaaacactccaatatcagaatcattgtcccgtggcactgacaaggcaaag

SEQ ID NO: 84852 - DNA, 265 bp, Glycine max
  Clone ID: 700954802H1
agttcatcagatacccttcagaatgtaggggcaattcccccaacatgcaagcgcatagagtgtcccagctatgatgtcattcactttggcaacggctacgaaatccgtcgctataattcacccgtttggatttcgaacagccccattctagacatttctctggttgaagccacaagaaccggcttcaggaggctatttgattatattcaaggtaagaaaactacaagcagaaaattgagatgacagcgcctgtgatcagtgaagt

SEQ ID NO: 84853 - DNA, 266 bp, Glycine max
  Clone ID: 700954803H1
agatgaacaagtccaacgacaacgattggttccgtatctccgccgccaatccggaaggcactcgctggaccggtaaatgctggtacgttcacaacctcctcaagtacgaattcgacctccaattcgatgtccccgtcacttacccttccaccgcccccgaactcgaactccctcaattggatggcaaaacccaaaagatgtataggggtggaaagactgcttgactgtgcacttcaagcctctctgggccaaaaattgccccagat

SEQ ID NO: 84854 - DNA, 263 bp, Glycine max
  Clone ID: 700954804H1
aacaaaacagagcaaagagagagtgtgtgaaaagtgaaacaaaaaacagaacaacaatggcgacacttaaggttcctcagcctcttccccccgttgcagatgattgtgagcagctccgaaaagccttctcaggttggggaactaacgaggagctgattgtatcgatcttggctcataggaatgctgctcagaggaagcttatcagagaaacttatcccagacctatggagaagatctcctcaaggccttggacaaagaactca

SEQ ID NO: 84855 - DNA, 265 bp, Glycine max
  Clone ID: 700954805H1
ttggaaactcacttcaggtgtatattattgtcacggattaacaaaaatccagcaagtgactgtcactgtttacatctgatccaaaaataataggttccgcaacaaacaatagaagcacaaaaaatataaggtgacactattggcgaattgcaaatgtgcaatcctcaaatcttactccaagacaaagctccccacgatgccgccttgcatgtacttgcaatcccctcgatgcacgtcttcctcctgagcatctaaatctttccaa

SEQ ID NO: 84856 - DNA, 263 bp, Glycine max
  Clone ID: 700954806H1
ctctctcagtccaactccaaccacagagacaacatatacaacatcgttgtttccatggcaatggaatctgcgcttacagcttctaactggatccgttctttgattcggattcgcctcactaagccacgcttcggtgctattcgtcccacagcaatacgatcctccatcgactcgtatctcgtgtccaaactcactccctctgagcctcacatcctacgagacgactccgcatcgacttctcttccatttgcggcgttgttaat

SEQ ID NO: 84857 - DNA, 260 bp, Glycine max
  Clone ID: 700954807H1
ctcgttcttgctacaagcaacaagatgctatctttgatccatcaaagtctacatcatattccaatattacatgcacatctacgctttgcacccagctctctactgctacagggaatgagccgggatgttcagcctccacaaaagcatgcatatacggcatccagtacggtgacagttcgttctccgttggctacttcagccgcgagcggctctccgtgacgccaccgacatcgtcgacaacttcctcttcggttgcggcc

SEQ ID NO: 84858 - DNA, 238 bp, Glycine max
  Clone ID: 700954808H1
atttcatttgagtatatctattatagttgactactcaactaagatggactcgaagagggagatagcattacttatttcaggccttctggccatgctcattttaatctcctcagatgtggcagccagagaattgaaagaggtcactggtgctggcttgtctggtggtcgtggggtcaactatggtggctttggtggtggctcccctagctttggtggtggtcccaggctatggaggtgg

SEQ ID NO: 84859 - DNA, 270 bp, Glycine max
  Clone ID: 700954810H1
tgctttggcaagtcctcaacccccctccccccagcataaagagctatagttcccttctcagccacaatatggctttgtaaaatgggaaggactccttgctgcagtcacgaggaattgagaaaaggggcatggacggttcaagaagaccagaaactaattacttacattcagaaacatggcacaggaagctggcgtaccttgccacagaaagcaggtcttaaagatgtggaaagagttgcaggctgagatggtttaactaccttagacctg

SEQ ID NO: 84860 - DNA, 268 bp, Glycine max
  Clone ID: 700954811H1
gttgctcttcaacagccatgttgatgttactgtaacctttcttcttcttctgttcctatctctatttggaattggatcatcctcagcagcacccttttacatcgatacttactgcccaaagaacgcatcgtacaattccaacgtaacattcgaaaccaatctcaaagtcctcctcgcaactctcgtctccaacgtttccatgtccggcttctactacacctcatgggcttgggaaccacaagcgtcgccaacggccagttcctctgcc

SEQ ID NO: 84861 - DNA, 181 bp, Glycine max
  Clone ID: 700954814H1
ttcttacataagagtggtgattcgtcctacggcatcgggaatctccctactgggcagatatagtataggccatcgcgccaggctggctcttccagtaccaaccatgaagttatcatctacctcttctgggtcagcaaaccaagctgggtcatctatccccaagaccaattgtagaagggtc

SEQ ID NO: 84862 - DNA, 273 bp, Glycine max
  Clone ID: 700954816H1
cgcaaacttcaacttgtaatcaagggagagagaaaatttcaagcacaaaaaatggcggagaagaaagtggtgatcctaggaggtggtgttgccggtgccaaccttgcaaaaactatacaacgtcaagccaacgtcacccttattgatccgaaggaatattttgagattccatgggcaagtttgaggggattggttgagccaacttttgctgaaaggatagtgacaaccatagagagtacttcaaaaagggtaaccttgttgtatccagtgctg

SEQ ID NO: 84863 - DNA, 268 bp, Glycine max
  Clone ID: 700954817H1
attcttccccctccacccacccagcatatctctctactcctatttattagcacccctcacattaccttgtgtcaccaactactttgactcctttaccataccattacaataattatcaaacctaaccagtaaaaatggtgaccgtggaggaaatccgcaacgctcagcgttcccatggacccgccaccatcttggccttcggcaccgccacgccgtccaaagcgtctcccaagccgattaccctgactactacttccgcattaccaac

SEQ ID NO: 84864 - DNA, 258 bp, Glycine max
  Clone ID: 700954821H1
agaagacaggttcaaaccggagcaaaaaaacttgttacgatggtttcttccgacaaggatccacgacatgaagtccttcaaacatggtacatggatgatagtgatgaagatcaaagactcccccaccacaaagaacccaaggagtttgtctcgttggaccaacttgctgagcttggagtccttagctggaaattagatgctgataaccatgaaatgatccagagctgagaaagattcgtgaagagcgtggctacacct

SEQ ID NO: 84865 - DNA, 268 bp, Glycine max
  Clone ID: 700954822H1
aggttgcacagatagtcactactcactcacgagcatgcacgtcatctaataatgcactcattgatggtactccaccaccttagctttcaacacgggttcgacagaggcactgtgggaactgggtggctgagattagactcccgaagaaccggaccatgctatcgctgggaaccttcgacaccgccgaggaagccgctactggcgtacgacaaggccgcgtcaagctccgaggtgacttcgccaggctcaacttccccaacctccgaca

SEQ ID NO: 84866 - DNA, 263 bp, Glycine max
  Clone ID: 700954823H1
ttagaattaaaaagcgtgaaggacagtgataggtttggtttggaaggaagaagaaaatgaaggccatagtgataacgaggccaggaggtcccgaagtgctccaacttgaggaagtggaagatcccctagtcggagacgacgagcttctcatcggagtccacgccacttcccttaacagagccgatacctttcagaggaaaggctcctaccctcccccaagggcgccagccttacctcggtctcgaatgttccggaactgtcct

SEQ ID NO: 84867 - DNA, 267 bp, Glycine max
  Clone ID: 700954824H1
cagactcagctcctatctcttgttttaaaataattagcatttgtgaagattattttcccctaattgtggagagaatagccccctaggcattggactcgtgtgtcagtgttgcaaccaagcaaccttagctatgtctctccttgttaattctcctctgctgccactgcaaagtactcggtggttgaaaccgaagcaagaagctaggtttttgtcacacggccaaccataataggaggaggaatgagcacaaacatctttggaactgcg

SEQ ID NO: 84868 - DNA, 268 bp, Glycine max
  Clone ID: 700954825H1
cagcaacaagatgtggaaccaaccattgggaaaaaccgatttggaaagcggttctcgcccgctgtatccgatgatgcttgagagccccgaactgcgctggtctttcatcagaaaagtatactccataatcgccatacagttgctcgtaaccatcgtcgtcggcgccgtcgtcgtcaccgtccgcccaatcagcgtcttcttcgccaccaccggcgccgattggctctctacatcgtcctcatctttgtccccttcatcacattgtgtc

SEQ ID NO: 84869 - DNA, 268 bp, Glycine max
  Clone ID: 700954826H1
gaaatgcatgccaagacagactcggaggtaacaagcctggatgcgtcgtccagcacaaggtctcctcggcgagcagtgtactacgttcagagcccttcccacgatggggagaaaacgacgacgtcgttgcactccacccctgttctcagccccatgggttcccctcctcactctcactcctcctccagccgcttctccgcttcacgccaccgcaataacataataataaatcttggaagggcatcgacgtcatcgaagaagagggtct

SEQ ID NO: 84870 - DNA, 267 bp, Glycine max
  Clone ID: 700954827H1
gtttttcttttggttgcatgttcaactcgaatacaacatacatacagatacctcttcttcttcttcttcttcttcttagaaagtcaaaccaatacaatgagtagaagcagaggacacacgatcatggaggttggacctgacggggttgccatcatcaccatcgttaaccctcccgtcaattctctctcctatgatgtattgcgcagttttaaggagattttgatcaggctctacagagagacgatgtcaaggcaattgttgttacag

SEQ ID NO: 84871 - DNA, 267 bp, Glycine max
  Clone ID: 700954830H1
tctcaaagaaaagttcaagcgcatgtgtgaaaagtccatgataaagaagcgatacatgcacctgacggaggagtttctgaaagagaacccgaacatgtgcgagtacatggcgccatcgctggacgtgagacaagacgtagtggtgatggaggtgccgaagctgggaaaacaagccgcaacgaaagcgattaaggagtggggtcaaccaaagtcaaagatacacaccttgtgttctgcaccacttcaggcgtggacatgcccggagca

SEQ ID NO: 84872 - DNA, 270 bp, Glycine max
  Clone ID: 700954831H1
cggcgatctccggcgggttcgacggggaagagaagcggaacgggccagtgcacgtcgacgggattcctgtggggttgccaaggttgcacacgcttcgtgaaggaaaatcatctcaatctggttcctttaagagaagtcttttaagaccaacttctcccaagtcccctgttgcaagtgccagtgcctttgaaagtgtagaaggatcagacgatgaagataaatgacaggcgaagttaaactggatactacgtatctgcacacaaatgggac

SEQ ID NO: 84873 - DNA, 265 bp, Glycine max
  Clone ID: 700954832H1
gatgggtaccgttgattcatgcgcgatacatgggtgaggccaagacatttacgcctacccaagtgtttggaatgatgctgtcgaatcttaaggaaattgcggagaagaatctcactacggcagttgttgattgttgcattggaatcccggtttatttcactgatctgcagagaagggcggtgttggatgcggccacaattgctggtctgcacccgcttcgttgattcacgaaatgactgccactgccttggcctatgggatttat

SEQ ID NO: 84874 - DNA, 266 bp, Glycine max
  Clone ID: 700954833H1
ctcacttttttcagcttctctaaattctctgtctacttcaccaagcacttttggttgcagctttggttaatttccaatatggtgtttcctctcctatctatctttgctttactcaatcttgcagtggtggcaacccatgcagaaaccttgccccctgaagtttactggaagtcgaagcttcccaccactccaatgccgaaagccattacagatatcatcacccagatttggcagaagacaaaagcacctctgtggccgtaggaaag

SEQ ID NO: 84875 - DNA, 259 bp, Glycine max
  Clone ID: 700954834H1
cgcaatgaagagacaagcgacggggatcacaagggtaacatcaccagcaagaaaaagaagtagggcaagatggtaattggtggaggatggagtggtaagaacgacttggagagtttgaaggagatcatggatgagttcatgaggcagcagatgcgaatggaggcacagtggatggaagcctttgaggcaagagagaatgagaggaggctgccgagatggcgtggaggcagaccatggaggctttggagaatgacaggtt

SEQ ID NO: 84876 - DNA, 243 bp, Glycine max
  Clone ID: 700954835H1
ctcgagacgctcgagccgccatatttatgatcattacttttttgagcagtcaacagatatggttgattaaacacctgttatgtataggttatgtacagataacagtgattcttacttcttcctcaacaaggtaacatcccatttcccaattccatctggcaacaacagcaactacttcacttgttgttagatactcatttcatttgaagttggtctagaatggatggagtggacctttgtatg

SEQ ID NO: 84877 - DNA, 255 bp, Glycine max
  Clone ID: 700954837H1
aaaacagagtaaaagagacagagcaataacacacacacaaaaacacaaacacagacaccttttaagtattaaggtgtctctttctctccccggaaagtttctccgtcggcggtggtgattgaccggagtgccatggagtctggacggattttctttggtgcctctgcttcaagcggcaacaacatgctctttctcggcaacactgaacttcttatcgagggagatcgattatgagcatggatgaagcctcgaaga

SEQ ID NO: 84878 - DNA, 255 bp, Glycine max
  Clone ID: 700954838H1
ctgcctcttcaatgatgcagaaacgtgcatgtggaaagtctatggggctactgatgacccttaaagacggtacctggcgtgatgcatgtgatggcctcggcatttccttgttgctgacatcaatccctggatttcagtatacggtgttgtagcagctgagtcaacgatcactgagtgaatatacaccccaatgctgctacatgctcatctgagcatcgctttccgcgtatatggtcattcctttacgtgcaattt

SEQ ID NO: 84879 - DNA, 255 bp, Glycine max
  Clone ID: 700954839H1
caaacgatggcgtttcgtggtctcggtgtgttgttggtgttgtcgactgtgattggcgcgggcgccgacgatgccaaacgcgacgacgacatggctcccgagtcgggatcctacaataaccccttacaactggtgaaagtggacaactaggtggatggtgaggaagggcatatgtatactggcgtcagtgcaagatttgggtctgtgttgccgggaaacctgacaacagtgtgaaaactccatcaatattcgctg

SEQ ID NO: 84880 - DNA, 267 bp, Glycine max
  Clone ID: 700954841H1
cattcagctgcacaaagaatcccaaagtagagaaacagcacactctcacctcactcacttgtccttgttatatttgttttatatcttgtcacaatctgtgactgttcgagttatccgaggcccctcttttatatggtcgttgataaaatggcttcgacccttttaacaaagatgcttttgggtcaccgattgatacacccttcttcgttcctcactcccagccacagattctctcttctctattcagtaaacggctgttttgtatac

SEQ ID NO: 84881 - DNA, 265 bp, Glycine max
  Clone ID: 700954842H1
aattaaattagtggttaaggttgttggaggagctctaacaagagatggagacacaaaattggttcgaaagagtgaagcctttagcagctgtggtatcaatgcagtttggatatgcagctatggatgttctatccaaggctgcaatgaacaaagggatgagcaactatgtgtttgtcgtttatcgtcatgctgttgcattctttgttatggccctttggcatggttttttgacaagaaagtaaggccaaagatgacattatcaatt

SEQ ID NO: 84882 - DNA, 267 bp, Glycine max
  Clone ID: 700954844H1
cttttcctgtgtctttctctctctctctctctctctctatatatatatatatatgtatgtattttctttacaccgtctggaatcatccattgatttcaatccaaagcaccaaatccccaaagcaaaagtgctactgtcttagaaagagagagagagagactgcgtttgacgccaagagagagaaaaaatggtgaacttcatgttgatgattagtgcgaccttgagaacctcaccaatctccaaccccaaggtggctgcgacgaccct

SEQ ID NO: 84883 - DNA, 268 bp, Glycine max
  Clone ID: 700954846H1
ctcagcccccgaagtcgggagggtcagcatgaggaagaccgtcaccaagcaggcctcctccggaagcccatggtacggcccagaccgcgtcaagtacttgggcccattctctggcgagcccccgtcctacctcactggcgagttcccaggtgactacggctgggacactgctgggctttcggccgacccagaaaccttcgccagaaaccgtgagctcaagtgatccactccaggtgggccatgctcggggccttgggctgcgtcttcc

SEQ ID NO: 84884 - DNA, 269 bp, Glycine max
  Clone ID: 700954847H1
tctccgaacaccgcccccgacgttatctttagccccgaagacgacgatttccacccctttcacatgtttccttcctcctcggaacccgctaataactgtttgtctgattggaactacaaagaccccacgcgtctcttaaccctaattcagtacttgatggatcaatatgtgctttatcagatgaagctcgtcggagaagttgacgacgaccggttgacttcgaaatcagtactatcttgtccagggagggaatagaaatgcatatgagt

SEQ ID NO: 84885 - DNA, 252 bp, Glycine max
  Clone ID: 700954849H1
gatcttgtaaatgaggaaattagagtaagattttcaagtgggagatttactatattgaatgagttggaagtagttgattcctctgtgaaggaattatatcctattatccagggcattgcagataccattgagacagaatcacttgcgaagattgttggggaattaagcagagcaacagagaagctttcacaaggactagatcttcttacaaaggagtcgatagctttttccaagtggtcttgaccggtcgtg

SEQ ID NO: 84886 - DNA, 257 bp, Glycine max
  Clone ID: 700954850H1
gcagaatatgacaatcttgtagtgctaagggactacaattatccctcgagcagcacctgttaccgatgtggaggacgggaatcatggtgagactgataccattccagctcccgtagttataattgaccgagactctgatcctggtgctaccgtggtggagataacttttggtgatcggcttggagcacttcttgacacaatgaatgcataaaaaacttaggtctcaatgttgttaaggcaaatgtctttctggattc

SEQ ID NO: 84887 - DNA, 251 bp, Glycine max
  Clone ID: 700954851H1
tatcagtgccaatctttccatcttacttctttcatcctttgttctgtcttggttggtagaagtgtgaatcgagctgcaatcctaacatggataatgatttcgttcttgaatattgataacctagtcccctggagtagtgttaatattctttttggcagtgaacagatagtccactgtcaagttacctagttaatgatgtgaaaggtttatttgatccaaaggaatctaccaaagtgctgatagtgtggagt

SEQ ID NO: 84888 - DNA, 115 bp, Glycine max
  Clone ID: 700954852H1
ccttccttgacatagatcacgaatgagtctacaacgagtacgacgatgtttcccaagatatgacccatgttgtgatgattggtgagccaggactccttaccatcatcaccaatca

SEQ ID NO: 84889 - DNA, 258 bp, Glycine max
  Clone ID: 700954853H1
cgtgtgaagaacaacccccccttattcgaaaaagtgaatttgagattcaatgcccaccaaacgccattcaatttgcctccctcccaatcccacagcgctccctccaccgtgacaatcactcactctccactcatcatgataagacagacgcgtgagatacattcctctcagagcgcgtggaaacaccccctctcgcagcagcaacccttccgtcgtgccctgtcccttcagaaccaaactcttccttctctcaacttg

SEQ ID NO: 84890 - DNA, 254 bp, Glycine max
  Clone ID: 700954855H1
gtttctccctttctctctgtctctctctcgctcttcttctcatccagcaccgagtcacagactcaccgatcttccgattccctttcgtcttggtttatgagctcgaaggagagacccactcttagtggcacgcggattaagacccgcaaacggaatattgactgcgccgctggaccctgcagcattctcggatgcagtggtctagatttatctgataatgctggtgatctggaacttattgctaatagcgattg

SEQ ID NO: 84891 - DNA, 259 bp, Glycine max
  Clone ID: 700954856H1
gcgagttactcatggcgaacgcggcgcttcggaacgtgaaggtgctcccgaactcggcgaatatggaggaaacgcgtcaccgagtcttcgaattcttcagaacggcctgcagattgttaccctccgatatggcaatctacaacctctacgacgtcgtttccgtctccgaactccgctcctccgtcgcctcccagatccgcaacaacatccacgtaccgatcccaaagtgatcgatatgctgcttttccaggggatggac

SEQ ID NO: 84892 - DNA, 265 bp, Glycine max
  Clone ID: 700954857H1
tctcgagccgaatcggctcgagccaggcatgctcattatggtctaaccttatcggatctccacctcagtaaattgcaatcaactctatcttcggctggtttcccgcctcttgatcacgctgctacgccaatgaaggtctcaaataacaagacattgcaaaagcctagcatcagtgagaacgtctcttgcttactatctatgacaaattctactcgtcttcaaagaaattggatgctgggaagacaccttcgctcatgctttttgg

SEQ ID NO: 84893 - DNA, 262 bp, Glycine max
  Clone ID: 700954858H1
cactgtcacaggtgtagcggcgaaactgaggtcgtagaaagaatggcgaaaacgacgtcgttgttgctctttacactgctcctcttcggaaccttagctctcatccaggcgaagaaatcgaaggaggatttgaaggaagtgacccacaaggtttactttgatgttgagattaatggaaaagtagcaggtcgtattgtgatgggtctttttggaaggctgttccaaaaactgcagaaaactttcgagctctttgcactgggga

SEQ ID NO: 84894 - DNA, 260 bp, Glycine max
  Clone ID: 700954859H1
cagtcaaactgtagtcaagtttgtcggtggattgggtctatcatggcaattatcttttggaattctagtccttctctacttttactctcattacttctttgcaagtggagctgctcatattggtgccatgtttactgcatttttgtctgttgccactgctctggggactccgccattctttggagccatagtgctgtccttcctctccaacctatgggtggccttacgcattatggaattggatcagctcctgtgttttt

SEQ ID NO: 84895 - DNA, 264 bp, Glycine max
  Clone ID: 700954860H1
tcttcttggagtgtacatccgaagcaaaacccaaatttcgaagcttcagttccatggtgcagactcttgtctcagtctgcgcagaatccgaatgttttaatttgcacacccaactttactattggctcaagtaggagttgcaattttgtgttgaaggatcagactataagtgcaaatttgtgcaagatcaagcacacgcagcgcgagggaagtgcgtggctgtgctagaaagtatgggtagcaaaggatcggtggtagtgaatg

SEQ ID NO: 84896 - DNA, 265 bp, Glycine max
  Clone ID: 700954861H1
gttttcccttcttgtccattcatatatatcacaatttcaactgcaaattttgaacaaaacttaattaagaaatccttctccggagccatggcagatctcaagtccacattcttgaacgtctattctgttctcaaatctgaactcctccacgaccctgcttttgagttctccgatgattctcgtaattgggtcgaccggatgctggactacaatgtccgggaggaaagttgaaccggggactgtcagtaattgatagctacagatt

SEQ ID NO: 84897 - DNA, 263 bp, Glycine max
  Clone ID: 700954862H1
cttttgctcatttcctttgactcctcattatcaaagaaaatggctctcattgggttgctcttgatgggttttctcacaatgttctcctctgctcatgcctatggtggagggtggactaatgctcatgccaccttctatggagggagtgatgcatctgggacaatgggtggggcatgtgggtatgggaatctctacagccaagggtatggaacaacactgctgctctaagcactgcactgttcaacaatggcttgagctgtggc

SEQ ID NO: 84898 - DNA, 266 bp, Glycine max
  Clone ID: 700954863H1
atttcttacctcttggcatggccattcaaatgtcttcttttgtctttgtttctcttacaattttattttgcttctcttccttggagaagagttttgcctttcaaacaacaaaggaggacacagaaagcaacaatcttcatcaatatactcatcttgttcacctcagctcactccttccttcatcttcctgcagctcttctgccaaaggtcctaaaagaaagcatcattagaagtggtacacaaacatgggccatgctcccaactga

SEQ ID NO: 84899 - DNA, 257 bp, Glycine max
  Clone ID: 700954865H1
tgcgcatcacagatggcaaagctacatatgtttcccgttttatgagaacttactcgccttaaacaagaagaatactttggaggctccaaatttatgaagattggagatctcaaaggtctattcggacttttaatggttaacatacatatgctgagaactaaatggaaagtgctggatgcttcttatggaactggaacagctaatactgctctctatatcaccatgggaaacttctagcactctcagaagcagataaa

SEQ ID NO: 84900 - DNA, 267 bp, Glycine max
  Clone ID: 700954866H1
gtttcaggtactttgaccgtgatgttgaatgcatctttaagtttttcaggaaaaggttcaatctttcttttcaagaaagcatagatgataatgatgattctgatgaagggagagatgaagctggaaaaccctgtttttcttcaatagaaagaagtgctggttttctagatagggaacttgcttactatggctttactagaaagaatgaagaagatattaaaggttcattgaaggcggggccagaagtgatacaaattcagatagtga

SEQ ID NO: 84901 - DNA, 267 bp, Glycine max
  Clone ID: 700954867H1
ccgacacggaaaccacgcccgaacaaccctccactccgccgcaaacggaggctccgccgcagcccgacccctccgccgccgtctccttcagcatatggccccccactcagcgcacccgcgacgccgtcgtcaaacgcttgatcgagaccctctccgccccctccggtcctctccaagcgctacggcactctctcctccgacgaagcctccgccgccgccgacagatcgaggacgaggccttctgcgccgccaccgcagcctccgctt

SEQ ID NO: 84902 - DNA, 265 bp, Glycine max
  Clone ID: 700954868H1
caaaaacagtgtaacaaaaagaaaaagaaaaaaaatatgaagttcgctataatcacaatattgttctctttatttcttcttgactttggttttgcacaacagggggatcttgacatatcaagatttggaggaaaaccaaatacaaatataggccaggctttcttaagtgcctggactcaagcatgtgcatcaccaactgctgtcaaaattgtgattcagctggcacataccaaatgggtgcagttgatgtcaaaggtccttgcaa

SEQ ID NO: 84903 - DNA, 266 bp, Glycine max
  Clone ID: 700954869H1
ctgctgaaagccttgtgactttggttagctggctgtgttcttggattatatcatattcttttaacttcctcatgagttggagttcagcaggtatgttatcatttaatcttggtcctgagggtaaaaataaaaaggaaaagttaagaatttttaagaaactagggaagtctaatagaaacgtaaggagtccttattttacatatggaataagatttacttatgttatgtttgggctagagacttcttaatgttctctagcatatgtg

SEQ ID NO: 84904 - DNA, 253 bp, Glycine max
  Clone ID: 700954871H1
ctctcctcagttatccctccaacaggagatgaaacatggttctagttgcaagtcatggcgaggaggaaacagggggcaagaggcattgctgctgttgattttcgaggtcaccctgttgacatgatcaaaactggaggactgctcacagcagggctcatcttaggtactgacctagcagaaagcatatgtgtaatgggcattagcatgaactaatgacctacttcgttggtactttgactcttccttcagctga

SEQ ID NO: 84905 - DNA, 258 bp, Glycine max
  Clone ID: 700954872H1
gcaacattcacactctgcggagctcccaaagcaagcactaatctaacaaacgcaatttaaaaaccgcaacaaacttttctctctttcgttcacacacttattctctggcttctttttcttcttccattttcgcttctcgtagcattttcggaacactcatggcttccattgccggatccagctgcgtcgctctccgaaccgccaatttcgcccctccgataaccggaaaatcggtcagatccggcaatggtctccaat

SEQ ID NO: 84906 - DNA, 240 bp, Glycine max
  Clone ID: 700954874H1
aagagagagaaagagataacagagagaaagaatgaatgagtaaaataatcattcactctgtttctattcttctttctaccatagcataactatgatatgaacaccatataataattaacaacaataatttaataatactctcttcattgtaaattccatcttcacttcacttctcttctctgttctgtggagtatttaatcatttcgtaacacatacttttcttttcattctctcaaatt

SEQ ID NO: 84907 - DNA, 253 bp, Glycine max
  Clone ID: 700954875H1
gggttattgagtgcggcggtccaaacactcttctctgcagcttttgcctacaactcccttcaccatggctgaacaaaccgagaaagcttttctgaagcaaccaaaagtgtttctcagcacaaagaagactgggaagggaaagagacctggaaaaggtgggaaccgctttatggaagtccattgggcttggatttaagactcccatggaagcctcgaaggaacctatattgacaagaagtgcgccttcactggc

SEQ ID NO: 84908 - DNA, 261 bp, Glycine max
  Clone ID: 700954877H1
caagtctcacttttttcagcttctctaaattctctgtctacttcaccaagcacttttggttgcagctttggttaatttccaatatggtgtttcctctcctatctatctttgctttactcaatcttgcagtggtggcaacccatgcagaaaccttgccccctgaagtttactggaagtcgaagcttcccaccactccaatgtcgaaagccattcagatatccttcacccagatttggcagaagacaaaagcacctctgtggc

SEQ ID NO: 84909 - DNA, 261 bp, Glycine max
  Clone ID: 700954878H1
ggaaccaaagaatatggttccttgctctgggagcaatcttctggttagagttggacgattgctcccagagccaggaaccaaagcatatggtgaacttaccagtaatcatcaaaaggcttatttgagaacaattacaggaaagactgaggccctactggacctaacagtgatagagatattgtcaaggcatgcttctgatgaggtctaccttggcagagggacaatccaaattggactgatgacacaaaggcaattcaagcc

SEQ ID NO: 84910 - DNA, 263 bp, Glycine max
  Clone ID: 700954879H1
aacctgattcatgtgccatacccaggttcgatggtgcggctttcctgaacagttggaggggtaagaagataatgtttgtgggtgactcactgagtctcaacatgtgggaatcactgtcctgtatgattcacgcgtcggtgccaaatgccaagaccggctttttgagaaaagaatcactgtccactgtgaccttccaggactatggagtaactaacagctataccgcacaccgtatttggtagacataattcgtgaaaatgtgg

SEQ ID NO: 84911 - DNA, 265 bp, Glycine max
  Clone ID: 700954880H1
aattccttcgttctaccgtcatcaactagaagaagaagcttcaatttctgcaaaatggatccgtctgcggcattgctgtttaaccacctcaaaggtgcagacccgttcttcctgctagcgggtcctaatgtgattgaatcagaggagcacattctgcggatggctaagaacatcaagactattgcatctgaagttggaataccgttggttttcagtcaagctttgacaaagctaaccgaacatcatcaaaatcatttcgtggccc

SEQ ID NO: 84912 - DNA, 259 bp, Glycine max
  Clone ID: 700954881H1
ctcacgcatttcctcgtttttttcttcccttttctctttctccggcgacgatctcagattccggccactcctctcgccggcgagcccttactcttccctcctccgtcgagccctctccgattcgaatcgttcccagcctcgcaccaccatgaatcccgaatacgattatttgttcaagcttttgctgattggagattctggtgtaggcagtcatgtcttctcctgaggtttgctgatgattcataccttgacagctata

SEQ ID NO: 84913 - DNA, 269 bp, Glycine max
  Clone ID: 700954882H1
gtttttgcctacctgagtggcttgatgatccttatttcgagtggctgcactggccacaagcctctattcctttctctgagtatgaaattgactacatttccaagcttgatccttttagggatgctgaggctttgagaaacgagcttccttcgtcgttgagggagtcatccattcgcgttcttattgtttgcaccatcttgttgaagcaagctgccgctgcggcctttgtcttgctgaaatagggcaaatgatgactaggaagttttgtg

SEQ ID NO: 84914 - DNA, 266 bp, Glycine max
  Clone ID: 700954883H1
gcagaaagcaagctcatcctagagttttaaaaatggcagcagcctcctccatggctctctcttccccatccttggctggcaaggccgtgaagctgggcccatcagcccccgaagtcgggagggtcagcatgaggaagaccgtcaccaagcaggcctcctccggaagcccatggtacggcccagaccgcgtcaagtacttgggcccattctctggcgagccccgtcctacctcactggcgagttcccaggtgactacggctgggaca

SEQ ID NO: 84915 - DNA, 267 bp, Glycine max
  Clone ID: 700954884H1
aagtttgattgtcctagctttgagcaacatcatgaagatctccattctctttatcacaatcttttcttgtggttttcttggaaatgttgtttcaaatgctagtcctcttccatatgaagctatttttaactttggtgactctataagtgatactggaaatgctgctcataaccacccacctatgcctggcaatagtccttatggttcaacatactttactatccttctggacgtatgtcaaatggacgactaatcatagattttata

SEQ ID NO: 84916 - DNA, 268 bp, Glycine max
  Clone ID: 700954885H1
gagaagtgcaggaggggtgggaatgattctcactaacactgaagccaatggggaagaactggttgcagattctcacctccttccagcagtagcgataggagagaaagaaggaaaagaactcaaaagttatgtcctatcaagtaaaactgctactgcagctctagcttttaaaggtacaatattaggaataaaaccatctcctgtagtggcagcattttcacaagagggcctaattttctcagccttgaaattctgaagcctgacttag

SEQ ID NO: 84917 - DNA, 251 bp, Glycine max
  Clone ID: 700954886H1
cgcactttcattctctcttaaaaatctaaatcccttttaggtcttcatcttagcctctgatgcaggtatgggttcgaaacgcatcctgaaggtgctcaaggatttgcagaaggatcctcctacgtcatgcagcgcaggtcatgtggctgaagacatgtttcactggcaagccacgatcatgggacctgctgatagcgcatatgcatgtgtgtattcttagtgtcaattcattttcctcctgactatgcctt

SEQ ID NO: 84918 - DNA, 256 bp, Glycine max
  Clone ID: 700954887H1
tcgtcttcaatttttgtttctcttcttacaaaaccttaggtcagatttctgggtttgtcttttctgataatctggagtggagctaagtcaagatgccgtgggtttccttgtttgtggatcacaaaagaaattgtgttcgcttggtggtgttttttcgtgtgattctgtaatttaattgctcaggtgtagtcccattaggttgcaaagactcttttcattagctgttctccttttcatttccaaagctgttaggggg

SEQ ID NO: 84919 - DNA, 259 bp, Glycine max
  Clone ID: 700954888H1
gacactttggtgggattaactaccctcttgggggtgttggtgggatagcaaagtccttagcaaaaggtctcgttgatcagggtagcgagatagtttacaaagcaaatgtcaccagtattataattgagcagggcaaagctgtaggtgtgaggctttcaaatggcagagagttctttgccaaaactataatatcaaatgctaccagatgggtacatttggaaagttactgaagggcgttccacttccgaaagaagaagag

SEQ ID NO: 84920 - DNA, 258 bp, Glycine max
  Clone ID: 700954889H1
ctttcttcctttgtaatagaaagcacgcgtttctctctctccctctctcaacgaatatttgtgtacttcctcttttgtgggtagattcaatttaccatgtcgagttcatcggaatactctcaattttccggccagaaaccggcgaggtcgccggagaaatcgagcttctctcagacttgtagcctgttgagtcaatacatcaaggagaaggtagcttcggagatcttaccctcggaatgacatcatgtgggtcacctg

SEQ ID NO: 84921 - DNA, 257 bp, Glycine max
  Clone ID: 700954891H1
aaggcattgcgttttagaaagcgataccgtgagagacaacaatgcatcgcgctagggtttgattatattacgcagatcgaaactccccccaacggtgtgttgaagcgcattttgcaatttcaataaataaataaatgggagaaaaatcgaggtccaaaggagggtgctgcggttggttcatcgcgttcgtcattctggctctcgtcgtcgtgccattgtttttaccgttaagaagaaatttagtcactccggttccg

SEQ ID NO: 84922 - DNA, 259 bp, Glycine max
  Clone ID: 700954892H1
gcaaaactgcaggctgctgaacagaagaggttgagcatcttgactaaggcccaaatgcgtttagcaagactggatgaattgcgtcaagcagctaaaagtggagtagaaatgcgctatgagaatgaacgtgtgaggcttggaacaaaagttgaatcacgggttcagcaggcagaggctaataggatgcttattctcaaggctctcaggcaagaagggcttctcatagagaaaggtcatctcagacattgatgagaaggat

SEQ ID NO: 84923 - DNA, 258 bp, Glycine max
  Clone ID: 700954893H1
gtccattctgtgcagtggagctcgcatagtgaggtcgcccctgccgtgacctgtctgccatctcgaagaagtgttatctgctgtgcgccttaggtcatcgtaccggaaaatgagtgacatgttaacaacatttacgaagaagaaagaggtggataccatcatcagagacacctttgataaagttgtggtcctccgctttggtcgtgcctcgaccttgtctgtctccagcaagatcacattctttctaaagcagcaagg

SEQ ID NO: 84924 - DNA, 262 bp, Glycine max
  Clone ID: 700954894H1
caataacatagcatagagtgagaagtgagaagagaaaaatggcaatctccatacccagtagacaacttttcatagatggagagtggaaagtccctcttctcaacaatcggtttccgatcatcaaccccgctactgaagacatcatagggcatattccagccgctactaaggaagatgttgaccttgcggtggatgctgctaaaagagcctttcccataacaaaggcaaagattggtcttcagctcctggctctgttcgtgct

SEQ ID NO: 84925 - DNA, 260 bp, Glycine max
  Clone ID: 700954895H1
gaaagatttcactgttctccagttaatgatctattgtgtctttggtgttctggctggtgtagttggtggcatgttgggactaggaggaggattcgttatgggtccactttttctggagttgggagtcccacctcaggtgtcaagcgcaacagccacctttgcaatgaccttctcctcatctatgtctgtcatagaatactacctgttgagagttttccagttccttatgctctttacttcattcttgtggctactattgc

SEQ ID NO: 84926 - DNA, 207 bp, Glycine max
  Clone ID: 700954896H1
gagagtggtttcagtgagtgatcggtgttcacttgatccttcataagtcgtcatcatcatcatcatcatcaccgttgattgaagaagatgccgatcagaaacatcgccatcggaaggcctgaagaggctactcaccccgacacgttgaaggcggggttggctgagttcatctccaccttgatcttcgtgttcgccggttcaggttcg

SEQ ID NO: 84927 - DNA, 259 bp, Glycine max
  Clone ID: 700954901H1
caaggaacatgcttagaaaactgccaagcccacccatattctctcaaaactttcaaccatgaactgaacaacaacaacaacaacaacagggccacccgtacagacccacctccaaagagatcatttttattaccaattttccgatttcacagagaaaattctttgtgggcatctcttcaaaaatgtcaagcttcccaacacggtggcggaaggccgcagtccggcaaggcaccggaaaatccacttttctcagacttgc

SEQ ID NO: 84928 - DNA, 259 bp, Glycine max
  Clone ID: 700954902H1
caagagatctctttgaggtttctcatcaaacacctttagccaacaacaatggcacctttgaacaaagttcttttgctcctcaccttattgttccttgcggtggatgccaaatacaaaaacaagaaagacaagaagaacagtgtttttcataagattcccaaatttccaaaatttccagttcctatcattggaggtgaccagaaagttgttgtggatggtggtaataatgccattgccaagcccgattttggaaacaaac

SEQ ID NO: 84929 - DNA, 255 bp, Glycine max
  Clone ID: 700954903H1
attagcacttcttcttttcacactgccgctgcaacaatggcttcagagaagaaactttcgaacccaatgagggagataaaagtgcagaagctcgttctcaatatctctgttggcgagagtggagatcgtctcaccagagccgccaaggttcacttcactcattgctcccgcttttttttttttttaatttaaatttctgtttttcttcttgcaggtgttggaacaacttagtggccaaaccccagtgttttccaa

SEQ ID NO: 84930 - DNA, 256 bp, Glycine max
  Clone ID: 700954904H1
caaaacaaaacttgatttgtaactttcaccgtatttccactcatatcccacaagcaccaccatgactccacctaaagaaatttcgaccgtcatttatcacaatggtcacataccagacaacccagttcagggatcggtgtacacatgtgcaaacctaatatttatttacgttagtcgttctattacgttaacataattgattcggaaaattaacaactgtctccctactcgagcaactgaaaaagtttctcaatta

SEQ ID NO: 84931 - DNA, 250 bp, Glycine max
  Clone ID: 700954905H1
agaagtaaacataaagagacattgtatgtgccatgaataaatttataagaagtaaagtatttcggttatccttcacaatcatctctttagtctttatcaaatggaatattcatttaaaaatggaatatttactaaaaaaatttactaaaatggaatatttttttaaaaaaatttatcaaatgagatagattttgaaaaaatattcatttaaaaataaatcgtaaattgaaccacgactgtgtacatatag

SEQ ID NO: 84932 - DNA, 257 bp, Glycine max
  Clone ID: 700954906H1
tagctatttccctctcttaacacaattaacaaagatatatcatatcatatcaactccaaatgatgaaaaatattgggttgtttcttcttgtggtggtggctacttttgtggtggcagccacagctggtagcctttaccaagactttgaaataacatggggtggtgagcgtgccaaaatctatgaaaatggaaatcttctcaccctctccctagacagagcctctggctctggctttcgttccaaaaaagaatacttg

SEQ ID NO: 84933 - DNA, 258 bp, Glycine max
  Clone ID: 700954907H1
ggatgctcttgtcaaggctgggattgaaattgacgaggaagagcttgctcgctttgtggagcatgttgacaaggataataatggaattatcacttttgaagagtggagagattttcttctactttatcctcatgaagcgactattgaaaacatatatcatcattgggagagggtgtgccttgttgacattggagaacaagctgttattcccgaaggcatcagcaagcatgtgcacaggagcagatattttattgcagg

SEQ ID NO: 84934 - DNA, 260 bp, Glycine max
  Clone ID: 700954908H1
agaaactggtgtctccgtttgcagcgtcactacttgctacaacacgagccatgaaacccaccttcccaatccactccaattcaaatttctcactataaaccacttcttcaaacttccctccgcaattcttaattcattcgaaccatggcagcgtcctcgctctgttcctctttcacctccaaaacatggaacccgcaccggccgcactcatgctatcaccacaaaaccccaagcccgccgtattccacctttcttcgcgg

SEQ ID NO: 84935 - DNA, 257 bp, Glycine max
  Clone ID: 700954909H1
agtggctataacactacttgcattgagttagactttgatagtttgattagctctaataaggttaaggaccagagaaagagagaaagaaacagaatttggaagaaaaaaagcacaagatgggttattggaagtctaaggttcttcccaagatcaagaaggtttttgagaagatagcaccaagaaagctgcgctgctgaggccaccaagtcctttgatgagtcaaaggaggaatacaacaaagcctttgaagaaaagaa

SEQ ID NO: 84936 - DNA, 258 bp, Glycine max
  Clone ID: 700954910H1
aaaaaagaagggagagtgtacgagcgaattatctctctctatatatagatagataaatgataaaagcctcgagggtccgtcccatccctgaaaatgctatgaggtgttgggaaatggttgaagtagttgaataggaggatcgctatgactatagctcttggtaaatttaccaaagatgaaaatgatttatgtgatattatggatgactggttgcggagggaccgtttcgtttttgtaggttggtccggtctattactc

SEQ ID NO: 84937 - DNA, 83 bp, Glycine max
  Clone ID: 700954912H1
gcgtgccaaggtcttgtgaattttgagcgttaagtgctgcaactaatcagatcccaagacccttggcctaccttgccatacag

SEQ ID NO: 84938 - DNA, 258 bp, Glycine max
  Clone ID: 700954913H1
agcacaagccaggttgagagatggagggaagtatccggtgctctgccaactacgttcctctcactccaatcagcttcttggaccgcgccgccgtcgtttaccgcgacagactttctcttgtctccggtgacgttacctacacgtggacccagacacaccaacgctgcatcaaacttgcttcttccatttctcaacttggtgtcggtctttctcccctcgatgtggttgctctattggcccctaatgttccagctatgt

SEQ ID NO: 84939 - DNA, 259 bp, Glycine max
  Clone ID: 700954915H1
gtgttattttgagtatcagcatcaatggctccaattgcagtgggaaacgtgattccagacggcattttggcttacttggatgaagaaaacaaaccccaaactgtctccattcactctctcgccaccggcaagaaagtcatcatctttggggttcccggtgccttcactcctacttgcagcttgaagcacgtcctggcttcattgagagagcagaagagctgaaagggaagggtgtggacgaaataatctgtatcagtgt

SEQ ID NO: 84940 - DNA, 259 bp, Glycine max
  Clone ID: 700954916H1
ccaagctccctgcactagctgagcttctcaattgagagggtgcatcagacgatgtgcatgttagcattgcatgccacctgcttgcaacggaaacaatattttgagctctgtgagaaattcttgtcgcagcatgcagacaaataatgatgcccaccacctgaacaagtgtggatacctaaaagaaacaacatacaaaaagaaatggtgaaatgacaggaattagttccttcaatctaaatgcgtattaatactttgaaca

SEQ ID NO: 84941 - DNA, 255 bp, Glycine max
  Clone ID: 700954917H1
gagaaaatctggcatcacactttctacaacgagctgcgtgtggccccggaagagcaccctgttctcctcacagaagcaccacttaatcctaaggccaaccgtgagaaaatgacacagattatgtttgagaccttcaacactccagctatgtatgttgccatccaagcagtgctttctctttatgctagtggccgtacaactggtattgttctggattctggtgatggtgtcagccacacagttccaatctatgaa

SEQ ID NO: 84942 - DNA, 139 bp, Glycine max
  Clone ID: 700954919H1
atcaaacacaaaatggaaaagaatgtggggattctcgccattgacatctacttccctcccgcttgcgttcagcaggaagcattggagactcatgatggtgccagtgaagggaagtataccattggacttggccaagact

SEQ ID NO: 84943 - DNA, 249 bp, Glycine max
  Clone ID: 700954921H1
agaagaaacagaagagagtcgaaaacggcagtcccctccctcattggaagggaggaacacagccagccacgacagggctactccctgggatcgggttctgtcttcttcattgcagcagatctcactacactgcatgcatatgggtggttgtcttggaccctttaaaaagccccactaattgctactcagatgttccgccaaaaggattgaggaaacaaggtaaggcagcaaagaaacctagcacatcag

SEQ ID NO: 84944 - DNA, 253 bp, Glycine max
  Clone ID: 700954923H1
ctcatttttttaggctcataaatcttttttatgggtttcagggtcactactactctgtctctgctctccctgttttggctcttgtccctgcaccaagcaagagctgcaaagttccacaatgtgagtggcttgagagggaaaagccagttgtagcaaatgggtgcaatttgttcctgggaagttgggtggttgacacgtcttatcctctctatgactcttcaacatgccccttcattgatcccgagtttgattg

SEQ ID NO: 84945 - DNA, 254 bp, Glycine max
  Clone ID: 700954924H1
gaagtaatggcgaacatagacatcgaagggatcttgaagcagcagcagccttatgatgggcgcgttccgaagacgaagatagtgtgtactttgggccctgcttctcgatccgtagaaatgaccgagaagcttctgagggcagggatgaacgttgctcgtttcaatttctctcatggcacccacgactatcaccaggaaaccctcaacaatctcaagactgccatgcacaacactggcatactctgtgccgtcat

SEQ ID NO: 84946 - DNA, 140 bp, Glycine max
  Clone ID: 700954925H1
cgataacacgtcctatcactttccacgtaagtctccaggtacagaaccactcatttcaatggaaattgacggcaacgttctcgcggcgaagtcgctggttcacttcggcgtgcaccacatgttcggcgtcgtggggattc

SEQ ID NO: 84947 - DNA, 257 bp, Glycine max
  Clone ID: 700954931H1
gggaagtatccggtgctctgccaactacgttcctctcactccaatcagcttcttggaccgcgccgccgtcgtttaccgcgacagactttctcttgtctccggtgacgttacctacacgtggacccagacacaccaacgctgcatcaaacttgcttcttccatttctcaacttggtgtcggtctttctccctcgatgtggttgctgtattggcccctaatgttccagctatgtatgagatgcattttgctgttcccat

SEQ ID NO: 84948 - DNA, 257 bp, Glycine max
  Clone ID: 700954932H1
ctcgagccgattcggctcgaggcacggtcgccgaagaagtaagaacaccaatgccagagaacgaaagcgcggcggcggcgacggtggaggaggagaacaacaccgccctgttcggaaaatacgaggttggaaggctcctaggatgcggcgcgttcgcgaaggtgtaccacgcgcgcaacaccgagactgggcagagcgtggcggttaaagtcataagcaaaaagaaactaaactcgtcagggttagcttccaacgtg

SEQ ID NO: 84949 - DNA, 135 bp, Glycine max
  Clone ID: 700954933H1
cacactaacaccaccacttcatcaactttacttgacaacaatattgtaaaactcagaatctagtttcatacttggggggttcttcttgagatggctctccaggctgcttctgtggttcctgcttctgtctcggtt

SEQ ID NO: 84950 - DNA, 253 bp, Glycine max
  Clone ID: 700954934H1
cattctctctgtgtatttgctacctctcccttcaagatgcagatcttcgtcaagaccctcaccggcaagaccatcacccttgaggtggaaagctctgacaccatcgacaacgtcaaggccaagatccaggacaaggaaggtatccccccggaccagcaacgtctcattttcgccggatagcaacttgaggacggccgtacccttgctgactacaacattcagaaggagagtactcttcacctcgtcctccgtc

SEQ ID NO: 84951 - DNA, 137 bp, Glycine max
  Clone ID: 700954939H1
ggaaatatatactttctggcctcagtgacaagagcatttgcatgtgggatttagatgggaaagaactggagtcttggaaaggacaaagaacccttaagatttctgatttggaaataacaggtgatggggaacacatg

SEQ ID NO: 84952 - DNA, 254 bp, Glycine max
  Clone ID: 700954940H1
aaaagccccttccttcatcaaggtactactgtttcatcttccctcaaagattggaacaacaacaggaacatgggtactctaacaactgttcctgtgctcccttctaagcttaacaagccttcgctttctccgcgtcacaattctctttttccctactacggaagacgcgtcgggaagaagaacaagcaatggttcctgttgctaggttgttcgggccagccatatttgaagcctcaaagcttaaggttttattc

SEQ ID NO: 84953 - DNA, 135 bp, Glycine max
  Clone ID: 700954941H1
aaaccctgaaggaagccatcgtagcctacactggcttctgtccttccaccttcttcacggtgctggcgcttctgtgtgccgttgactacgtcgtcacgggtctctgtggctcctccgacgatcaccatcaccggc

SEQ ID NO: 84954 - DNA, 253 bp, Glycine max
  Clone ID: 700954947H1
gttcaagactatttgatcaagaggatggaagagagtcacagagggaaaacagatttggttgtgctctgcaatgaaggctctcaagctgttaaaaatgtagacaagacacaatctgaaggggaagttttatccaatcttatcagttgtgtggaggaatctggtgcaaaatatgccgttctttatgtgtcggatccctccaggtcaatccagtatccttcttacagggatctgcaaagatttctagcagaaagta

SEQ ID NO: 84955 - DNA, 254 bp, Glycine max
  Clone ID: 700954948H1
gccaagtgaaagtgagaaacaataaaaatcaaagagcataatgtcagggatcattcacaagattggggagacccttcatgtgggagggcacaagaaggaggaggagcataagggtgagcaccatgctggagaatacaaaggggagcaccatggtgaacacagtagtgagtacaaaggagagcatcaggtgaacacaaagctggagagtaccatggtgagcacaagccagagcacaaagaggggttcctagacaa

SEQ ID NO: 84956 - DNA, 193 bp, Glycine max
  Clone ID: 700954331H1
attcgcttgattacgtttggcgtatccagtttcgatccagctggattgtccttgtaactaggaagatccagctggatcgaaagtggattcgcttgattacgtttggcgtatcatcttgatgtttggtgcagtcccggctgctcttacctactattggcgaatgagaatgccagagacggctcgctacacggcc

SEQ ID NO: 84957 - DNA, 206 bp, Glycine max
  Clone ID: 700954333H1
ggcttgaatcccttcgcaccttattgcatcgccaatcactcccttttcctttgcctttcctctcgctaaattacaattccctttcttgttcctctccaacttctccttctccgtttctgcggacatgtaaattcggaggacaccgtctttggttcggtctatttttttgggggttactttacttcggttacgcgtcgtcgttttgc

SEQ ID NO: 84958 - DNA, 249 bp, Glycine max
  Clone ID: 700954334H1
gccctcgtttactgcaccgctggcatctcagggggacacataaacccggcggtgacatttgggctgtttttggcgaggaagttgtcgttgcccagggcgattttctacatcgtgatgcaatgcttgggtgctatttgtggcgctggcgtggtgaagggtttcgaggggaaaacaaaatacggtgcgttgaatcgtggtgccactttgttgcccctggttacaccaagggtgatggtcttggtgctgaga

SEQ ID NO: 84959 - DNA, 263 bp, Glycine max
  Clone ID: 700954335H1
aataaatgcaaataccacaaagacttatgctacaagaaccatatttttcttgaaaaatgatggaactttgacgccattggccattgagttaagtaagccacatcctcagggtgaagcatatggtcctgttagtgaagtctacgtgccttcgagtgaaggagttgaagcttacatttggttactggaaaaggcttacgttgtggtgaatgatgcttgctaccatcaaatcattagccattggctaaacactcatgcggttgtgg

SEQ ID NO: 84960 - DNA, 268 bp, Glycine max
  Clone ID: 700954336H1
cttttgcgtacacagcctcaacaaccctaacgcgtgcagagcagagagagacgcagccatggggcgaagacccgcgaggtgttataggcaaattaagaacaaaccataccccaagtcacggttttgccgtggtgttcctgatcccaagatcaggatttacgatgttggtatgaagaagaagggtgttgatgagtttcctttctgtgtccatctggttagttgggagaaggaaaacgtttctagtgaggccctggaagctgctcgtatt

SEQ ID NO: 84961 - DNA, 267 bp, Glycine max
  Clone ID: 700954338H1
gaaaacagcatcgaacccgtcgtagcagaaaaacttgtcaccatggtttcttccgacaaggatccacgagaggatgtccttcaagcctggtacatggatgatagtgatgaagatcaaagactcccccaccacaaagaacccaaggagtttgtctcgttggaccaacttgctgaacttggagtccttagctggaaactagatgctgataaccatgaaaatgatccagagctgaagaagattcgtgaagagcgtggttacacctacatg

SEQ ID NO: 84962 - DNA, 262 bp, Glycine max
  Clone ID: 700954339H1
gtggctatgtgcctaatcgtccaccactgatgagaaggttaataccagaagagggtgatccagaatatgcaagtttccatgctgaccctcagaagtattttctgaatgcattgcctagcttgctgcaagccacaaagttcatggctgtggttgacacactctccactcactcacctgatgaggagtacttgggggagaggcaacaaccttcaatttggtctggagacgccgagatcgtcgaggcgttctacgatttctccgc

SEQ ID NO: 84963 - DNA, 264 bp, Glycine max
  Clone ID: 700954340H1
tgggtccctcactaacactcatactacataccctgactccgtctggaatgcctctgttttgttctgtcagagtttcactccgataaggaacatagataagcattgtgaaagagagagagagaggaatagcaagagtcctttttccactttgcatataccaatcattcgttttacggttccctttgttttctttttttctctgctagttgagcaaaaatggaggaagcgagtcctaaaattttcattccaaacacgatccaggga

SEQ ID NO: 84964 - DNA, 66 bp, Glycine max
  Clone ID: 700954341H1
taccaatcaaataacagagcaagatctcttctttctctctctctctctccgagtctgttctgtagt

SEQ ID NO: 84965 - DNA, 263 bp, Glycine max
  Clone ID: 700954342H1
cacagttatccattcacatttcacagttagcacttagcagactctgctgcagtgaggtgaggggaggtttgtttgttgtttcgtttttcctttcctttccgccagaatccgttgagaatggcgttgccggtagtcgtcgatgcagagtacctcaaggaggtcgacaaggctcgccgcgatctccgcgcactcatcgctaacaggaactgcgctcctctcatgctccgattagcctggcacgatgccggaacttacgatgctaa

SEQ ID NO: 84966 - DNA, 262 bp, Glycine max
  Clone ID: 700954343H1
ctgactatctaacactatttataggtttcatcattgccataaaggaaacctataaaaagttggctggtatgtttgaatttgttcagcaactaataaaagaaaaaggaactgactatctaacactatttttgttgtcattatgaccgtgtactgtgtttgtagtctgtgttccaccttttgtgtgattcatagttttgtatctaccattatttaatttcaagatcaacatgacagagatagagagggatgatctccttctcga

SEQ ID NO: 84967 - DNA, 264 bp, Glycine max
  Clone ID: 700954344H1
attcctttgtaaaccttagggagtacagacaggaggttctccgtctccttgttaaagtatttcagaagcttccttcaccagattatctgagcatttgccaatgtcttatgttcttggatgagtcagagggtgttgcaagcatactagagaagcttttacattctggaaacaaagatgatgcacttttggcatttcagatagcttttgatctggtagagaatgatcaccaagcttttcttctaaatgtcagagatcgccttgcac

SEQ ID NO: 84968 - DNA, 238 bp, Glycine max
  Clone ID: 700954346H1
ggaggatacaactgaagtggctgtgtggtgttacagttgagttgagcgatctcttctcttttcttgtcttgtcttttgcaatggctaatgcaattataatgccgggttttctgcttcgacccactacccagacgacgccgtttcggttgcccaatcacactcactccttccattcccctcgctgctccctttccctcacaccccaatcggctaaagcttttgaagttccaaggaggaa

SEQ ID NO: 84969 - DNA, 265 bp, Glycine max
  Clone ID: 700954347H1
cacaagatcttggctggcctcttggatcaacatacttttgctggaaaccctcaagctctaaaaatggtaacatggatggttgattacttctacaacagagtgcagaatgtaataacaaagtacactgtaaatagacactatcaatcaatgaatgaagaaactggaggaatgaatgatgtcctttatagattatacagcataacgggagattctaagcacctagtgttggctcacctttttgacaagccatgctttttagggttgc

SEQ ID NO: 84970 - DNA, 271 bp, Glycine max
  Clone ID: 700954349H1
ggaagatcttccggcaagtgttctggtgcttagtggtgttccttttcatcgtgctggtcacaattcttttgatatgggcaatccttagacccaccaaacccaccttcacgctccaagacgtcaccgtctacgccttcaacgccaccgtggcgaacttcctcacttcgagttttcaggtcacgctcatctcgcgtaacccgaacgaccgcatcggtgtttactatgatcgcctcgaaaccttcgtgacctaccggagccagcaggtcacgta

SEQ ID NO: 84971 - DNA, 268 bp, Glycine max
  Clone ID: 700954350H1
agagaatgatgatgaagtctgctatgtgtgcagtggtggttgtagcacttcttcttctggcggaggtggggcccatggctgaggctgtgacatgcaccccaacagagttgagtccgtgtcttccagcaatcacttccggtgctaaaccttccaatgcttgttgcacgaagctgaagcagcaaaaaccatgcttatgtggctacctcaaaaacgctagcttgaagcagtatgttaactctcctaatgcccgaaaaaccgttgcttcttg

SEQ ID NO: 84972 - DNA, 265 bp, Glycine max
  Clone ID: 700954352H1
caacctcgtattccagacctacctcgattgccgcaaacccgacaccgccctcgaacactacaagcagttcctcaacgacgcccccatgaacccttcccccaccacctaccgcgtcctcatcaaagggttaatcgataacagcaaactcgaacgtgcaatggatattaaaaccgaaatggattccaaagggtttgcccctgatcctcttgtttaccattacttgatgttggggcatgctagggtttccgatggtgatgcctatttg

SEQ ID NO: 84973 - DNA, 199 bp, Glycine max
  Clone ID: 700954353H1
cttgtttacacactgacacactccttcatccaactccaacagagcaagaaaacatagtacacaccacacagtgaaaaagagagaaactccatcttctttctttctttctcactcaccacagaacacaaaaaagctttccaaaattccgggttggggaatcacgcgaacccattcaaagggggggggaaggttttagggg

SEQ ID NO: 84974 - DNA, 262 bp, Glycine max
  Clone ID: 700954355H1
agatagtccacctgggaagccatatgtagctcgagcaagagcgcctccattaccttttcttttgtcaacccttctccaatcaagaccgcaattaaagttgccagaggagcagtttggtgatgaggacagtcttgatgatgaccttgatgaatcatcagagtctgatgatgaaaatgaacatgacgacttgccgccatttaaacctttaactaaggcccaggtggaaaagctgtctaaagctcataagaaagcatattttgat

SEQ ID NO: 84975 - DNA, 261 bp, Glycine max
  Clone ID: 700954357H1
gttggttgaataaaaataaaagtacttgtagtgatggtagtgccaataatgaatcttcttcaagtggaatagttggagaaagggataatcatcttgatcatgaaattgcacagctcacaaaacttaggtcaagtcctcatgagcttttgggtcgtgttgttcctggtaagatgaggttacctgcatctactgtgagaatgctggttggtagagaaggtaattattctggaagagggagattttcatcagcagatgggtgtc

SEQ ID NO: 84976 - DNA, 265 bp, Glycine max
  Clone ID: 700954359H1
atttttgtgtacctaatcccaatccgtttcttttcaatcttctcttcgaccccatttcctagatctgcttgtttcttccatcatcaactaatcatggttcttcacagagaactcgatcatctcttttcatcccctttcgttgaccctcccaaagatgatgcgaaatccagtggcatgtcaattgaaaagaagattgagttcctcgagagtttgactggaaaggtcacaaatcggaggtctcggaggtggttaaatgatcgtctct

SEQ ID NO: 84977 - DNA, 83 bp, Glycine max
  Clone ID: 700954360H1
caggtggcattattgagcaatcatttctgcttgggcaatttgctgtggaaatgccttcggaagtttaaaagggttgggttttc

SEQ ID NO: 84978 - DNA, 268 bp, Glycine max
  Clone ID: 700954361H1
cagaaacgtatgtcggttcgcgatcttgccagcaaatttgagaagggtttggcagctgctgctaagttgtctgaagaggctagactcagagaagcagcttctctggaaaagcatgttcttttgaagaagcttcgagatgcactgcaatccttaaaagggagagtggcaggaagaaacaaggatgatgtagcggaagctattgctatggttgaagctctagcagttcaattgactcaaagggaaggggaattaatacaagagaagtctg

SEQ ID NO: 84979 - DNA, 211 bp, Glycine max
  Clone ID: 700954362H1
ccaatcttccaccgttcaattcgctgcctcacggcaaagggtccttgaatttagaccccttggttgcttctcagttttgcgaattccatagatcaaggtcagccccgtcaaaatccctcagagaacagcgtctcgggggaaaaggtcaccgaaggaaaattttgggaaactttgtgagttatctgtctcacgagttctcttcattggtcac

SEQ ID NO: 84980 - DNA, 275 bp, Glycine max
  Clone ID: 700954363H1
gcaagggccatacaatggggttggactctgcacaccgacctcaaacttgtgtccgaacagagacctttacgcgttttgggatccattccatccatcagagaaagctagtcgaatcatagtccaacagatcctcagaggcaccactgagtacatgcaccccatgaatctcagcactatcatggccatcgattccaagacttgatcaatgcatcatctacaataaccttccttcgtattctatctatgtgtgtgccccctaattaagtttatttcat

SEQ ID NO: 84981 - DNA, 253 bp, Glycine max
  Clone ID: 700954364H1
tttcaatctagggttttattgaactctaattccatattctaactctgctttcattcgattcagggggaattaaattgtttctatattttgttttcagtttttcacaaattagaagtcgataaagaagatggtgagggtgttgagaagctgcattcaatcgacattgaagctggtaaactcggtaattgggatggccgggctagccatgattctatactccgcatggatgattagggtagcacaaaggaagatg

SEQ ID NO: 84982 - DNA, 262 bp, Glycine max
  Clone ID: 700954367H1
ctctgttctgtaatttaattagcaaacattgacatagcctctgaactattacaggatatgttgaatattgttgtatttcacaaaaaaaaagacaaaaaaaaaaaaaaaaaaaaaaaaaaaagggcggccccccattttttgccccggcccccccgggatttaatccgggcccggtccctgcgggggtacgattttcccctaaggggggccgttttgggctttggggtattcagggccatgattgttcccggggagaaatttt

SEQ ID NO: 84983 - DNA, 262 bp, Glycine max
  Clone ID: 700954368H1
gcgccgtattccttaaaagggggaactctaacaccggaattttcctcacaaacacaataatcgattcgaacgttcttgaagttgaaagtcattaactatgggaatgatagtggaggttgaaaacgaaaacggagacctaaacgacgccgttcttgttccaccccctaacttctccatggtcgaggactgcattttccgatccggcctccccaacccttccaatttcccctttctccaaaccctaaaccttcgttccatcata

SEQ ID NO: 84984 - DNA, 260 bp, Glycine max
  Clone ID: 700954369H1
cctaaactagaagagaaaaagagaaagtgcaacatcataacatcaaattcgtatgtgcttttgcttaccctaaaatctccatccctacaaaaagaagaagaaaaacaagaagaagtttaacatgtcagctgccgtggccgcttccgctgccgccgctaccatgtcgggttaccaccacaactcctcctcgagacaacaacaacacatagaccatgaattggccttaacaccacaacgagtgtgtgtctctccacctctga

SEQ ID NO: 84985 - DNA, 259 bp, Glycine max
  Clone ID: 700954371H1
gtctgttctctgtggaaaagttgttgtgtgaagagaagcgaatggtaggattgaatgtgtctcagccatttttgtcaccgatttgcaagacggcaccttacccacttgatctcatagccaccgccgcgtgcctccacttcggccaccttctccgccgccgcgccacccaccatccccgccttggggttcttcttcactcctgtttcaagattgaaggattagtggtgtcagagatgccttcaactcaatgggttgaact

SEQ ID NO: 84986 - DNA, 251 bp, Glycine max
  Clone ID: 700954372H1
attgactatctggaattaatagtatatgagagttaattaagacagcttgattggaaacaacaaagaaaagttttgatcggctaaaggggtagacattctgatgtatttttgtattaccaagaaggcaaagagttatgaattttcagatctcagttgcacacattaaagtttgttctgtttctgagttctgtttcaaagatcatagattaactcagactgtttctgggtgttttttatttttttttgataaa

SEQ ID NO: 84987 - DNA, 248 bp, Glycine max
  Clone ID: 700954373H1
caaacattagctatccctacaatactcctggtgatattcatatgggtggtacaaccaaagcaacgtcatgggaagattgcaccaggtcccaaggcgttgccaattattggtaacctccacatgctagggaaactcccgcaccgcacccttcaaacctttgcaagaagatatggacccataatgtccttgaagctagggcaagtccaagccatagtggtttcctcccctgaaaccgctgaactattcct

SEQ ID NO: 84988 - DNA, 150 bp, Glycine max
  Clone ID: 700954375H1
ctctgttctgtaatttaattagcaaacaatgacatagcctctgaactaatacaggatatgttgaatattggtgtatttcacaaaaaaaaagaaaaaaaaagaaaaaaaagaagaaaaaaaaggggggccccccaaaaattgaccccccaa

SEQ ID NO: 84989 - DNA, 246 bp, Glycine max
  Clone ID: 700954376H1
gcgccgtattccttaaaagggggaactctaacaccggaattttcctcacaaacacaataatcgattcgaacgttcttgaagttgaaagtcattaactatgggaatgatagtggaggttgaaaacgaaaacggagacctaaacgacgccgttcttgttccaccccctaacttctccatggtcgaggactgcattttccgatccggcttccccaacccttccaatttcccctttctccaaaccctaaa

SEQ ID NO: 84990 - DNA, 258 bp, Glycine max
  Clone ID: 700954377H1
cctaaactagaagagaaaaagagaaagtgcaacatcataacatcaaattcgtatgtgcttttgcttaaccctaaaatctccatccctacaaaaagaagaagaaaaacaagaagaagtttaacatgtcagctgccgtggccgcttccgctgccgccgctaccatgtcgggttaccaccacaactcctcctcgagacaacaacaacacatagaccatgaattggccttaacaccacaacgagtgtgtgtctctccactct

SEQ ID NO: 84991 - DNA, 272 bp, Glycine max
  Clone ID: 700954379H1
gtctgttctctgtggaaaagttgttgtgtgaagagaagcgaatggtaggattgaatgtgtctcagccatttttgtcaccgatttgcaagacggcaccttacccacttgatctcatagccaccgccgcgtgcctccacttcggccaccttctccgccgccgcgccacccaccatccccgccttggggttcttcttcactcctgtttcaagattgaaggattagtggtgtcagagatgccttcaactcaatgggttgaactatcttcaactatc

SEQ ID NO: 84992 - DNA, 224 bp, Glycine max
  Clone ID: 700954380H1
attgactatctggaattaatagtatatgagagttaattaagacagcttgattggaaacaacaaagaacagttatgatcggctaaaggggtagacattctgatgtatttttgtactaccaagaaggcaaagagttatgaatttccagatctcagttgcacacattagaggttgttctgtttctgagtgctgtatcagagatcatagattgactcagactgtttct

SEQ ID NO: 84993 - DNA, 265 bp, Glycine max
  Clone ID: 700954381H1
ctctggccctgttgttgccatgatctgggatggcaagaatgttgttacaactggccgaaagattatgggagccacaaacccagctcaatctgagcctggaactatccgtggtgactttgccattgacattggaaggaatgttatccatggaagtgatgcagttgaaagtgctaacaacgaaattgcattgtggttccctgagggccctgctaactggcaaagctcccaacactcttggatctatgagtaaatcatatgcctcaag

SEQ ID NO: 84994 - DNA, 261 bp, Glycine max
  Clone ID: 700954382H1
gattgaactggtgcatgctcaattcaaaagagccaaagctcaaacagaatttgctgatatacaactagacctagatatggcagtggcgcaaaaagaaaaggaccctgatcctgctgtactgaagagactttctgagaagttgcatctaaggacaataaatgacctaacgaaagagtctagtgaattacctgaattgttgatcacaagtggtggagaactacgcgactcttttgaaatgatcacatcccttctcagcaaact

SEQ ID NO: 84995 - DNA, 203 bp, Glycine max
  Clone ID: 700954383H1
gcataattgaatcgaattgaggagaatgacgatgaccaccatacaatcgacgccaggaagctcagggtatttggatttgtttcctgagcgcaaaatgtcatttttcaagagtccttatattctgggactcagtgctgtggctggcattggaggcatgctttttggctacgacacaggtgtgatatcaggagcacttctatata

SEQ ID NO: 84996 - DNA, 242 bp, Glycine max
  Clone ID: 700954384H1
gtgatctcggaattcggatctggtgtcaccgtcttgttttctgttttagaggaattggtgcctttaatgcttaattttctaatgaagcatgcaatattgttttgaattagtcaccttcaagtcgaggaacatacatatacacatatgtgttgtgatcaccacaccagattccacttctttgctgagtgtgtggatgtgtgtacatagattttgttgtgtatatatttgggttctcaccttca

SEQ ID NO: 84997 - DNA, 248 bp, Glycine max
  Clone ID: 700954385H1
attacaattaagaaaatcttggataatgaaataggcgaattatatgaggttcttcttaaaattgagtctttttgttttgaggttaattttttcctccacggtcaagccaaggcgattagttacgatagccacttatatttttgtctccgatgtaattgcaatctttaatcgtcgtccttcgtagtgggaatatatgtacagataatgtcttggcataatatattcagaaatgttaagacgttcttcca

SEQ ID NO: 84998 - DNA, 257 bp, Glycine max
  Clone ID: 700954386H1
aaattatccataaaaaactggttaaagccagtttcacttacccttggtgatgcagctctagccctacattatgcaaatatgattgtattgattgagaggatgttgtcgtcacctcacctggttgatcttgcagcaagagatgatctgtacaatatgcttccaactactgtaacaactgctttaagggctaagcttaagtgccatgcgaaaagtaaatcatcctccaatgctcatgatgcaaaccctgctgctgaatg

SEQ ID NO: 84999 - DNA, 235 bp, Glycine max
  Clone ID: 700954387H1
ggtaaaagcgggaccagagagaaaacagggggatttgtttctctctgcagttgcactcttgcaggcaggtgcagctgtttcccgttctgctcctctcccaacccctctgtttctttggagtgagaaagttttatactttagaaccagctagcgagcaagtgagccagtgtcatacatatatataaatagcgtgcgagaaatgcagcagcacctgatgaagatgcagcctatcatg

SEQ ID NO: 85000 - DNA, 256 bp, Glycine max
  Clone ID: 700954388H1
gccaaggtaggttaaacactcttcttcatcgtcgtcgcaatgggacgtgtgatccgtgcgcagcgtaagggagcaggctcggtcttcaagtcccacacgcaccaccgcaagggccctgcccgcttccggagcctggatttcggagagcgcaacggctacctgaagggtgtcgtcactgacgtcatccacgatcctggccgtggcgcgcctctcgctaaggtcgccttccgccacccgttccgctacaagaagcaga

SEQ ID NO: 85001 - DNA, 182 bp, Glycine max
  Clone ID: 700954389H1
cgaacaaccaaacatgtctccttcatcattgtgctctcttcaaacgttcccgccaatatctcacgcattgcttaaccgccaccacaaaccggcgcacgatagcaccgccggcgtacggagaagaacgccttacgtagtttgcgctgaaaaaggcagcagagcttcgacgcgaagccagatga

SEQ ID NO: 85002 - DNA, 255 bp, Glycine max
  Clone ID: 700954390H1
ttacaatatttcttagttcgcaccattgcaacacgcaatgttgttgctgattcagttcgatccagtcttgtctctttatctctgcagaacctaaagggtggttttttccgggcaccaaaatttgtggggttcatcacagttcgctcctttctgcaaaataaatttggcccaaaagtataatcaatactttgtatttcattttggataatgattgtggaggacgaaaattgtggtgttggttctgggggaggagga

SEQ ID NO: 85003 - DNA, 261 bp, Glycine max
  Clone ID: 700954391H1
ctctcaatacatttctcaagcagctctctgttactaaccctcctctcactcgtgcctaagcttcttctctcctttcgttcaacgttgtggcgtcgctgtgaaaaccctcaaagaagtgtcgtgaattttagagcaatgtgattgcctctggtggccttggcggggaggttttgatatgggatatcgaagctgcactagcttcagctacaaaatgcaatgatccaatggatgatgatgataattcaaatgatatcaatgttt

SEQ ID NO: 85004 - DNA, 254 bp, Glycine max
  Clone ID: 700954392H1
aattcttttgaagagttggagccagaatatgccaagggttacaaaaaagcaagaaatggaagagtttggtgcattggtcctgtttcactcagcaacaaggatgaactagacaaggctgagagagggaacaaggcttcaattgatgagcatttttgcttgaagtggcttgattcgcagaaaccgaaaggtgtgatctatgtgtgccttggaagcatgtgtaacataacatcacttcagttaatagagcttggttt

SEQ ID NO: 85005 - DNA, 208 bp, Glycine max
  Clone ID: 700954393H1
ggacacacgctcatggaggttggacccgacggtgttgccgtcatcaccatcgtcaaccctcccgttaattcactttcctttgatgtgttgcgcagtttaaaggagagttttgatcaggcgatacagagagatgatgtcaaggcaattgttgttacaggtgcaaagggaaaattttctggaggttttgatatttctgcatttggtggta

SEQ ID NO: 85006 - DNA, 193 bp, Glycine max
  Clone ID: 700954394H1
atggaaatagagaggctaagaagaaatgcagaggcgctggttgagaagaccatgaaagggaacgatgcttctcatgatgctgctcatgtttggagagttcgtgatcttgctctctcccttgccaaagaggaaggcctctcttccaatccccactccatggaaattgttgagctggctgcgcttctccatgaca

SEQ ID NO: 85007 - DNA, 241 bp, Glycine max
  Clone ID: 700954395H1
gttgaagatgatagcagcaccaaggaccttggttgggatgaacactggatcttctgggtgggaccattcatcggtgcagctcttgcagcactctaccaccaggtcgtaatcagggccattcccttcaagtccaagtgattcaatcaaacggttcatgcttaatcaagttgggaacaacaacaacaacaagaatcaagccaatgtttgtggggtttggtttcatttcgatgagatgatctgt

SEQ ID NO: 85008 - DNA, 277 bp, Glycine max
  Clone ID: 700954396H1
ctcgaggggaaccaaaaactgtgaaattctgaagccactaggccttttaaaaaccaaactaaggaagacggtttagacagagagtacttcaagctaagaaaatggaaagtggggttgtggctgtgaacaacaacatcaacaactatgaatccaaggcaacttccaccatcaccattaagggcattctcagccttctaatggaaagcattgatgatgagaattgtgatggtggtggaagcaagaagagagttatttctcttggtatgggtgaccaact

SEQ ID NO: 85009 - DNA, 249 bp, Glycine max
  Clone ID: 700954401H1
cagttgaggagcaacgattatgaatccatgtgagactatgtgggctaggagctttgagtagtagaatatgcaggaaaagttgcggattggatagctgaggagcttcaacatttgcttccagagaacgttgaagccaatttggacaaactggttctatcaggtcacagtaggggtgggaaaactgtatttgctgtggctcttggtcatgcaaaaactaatctcaagttttcagcacttgtaggcacatct

SEQ ID NO: 85010 - DNA, 250 bp, Glycine max
  Clone ID: 700954402H1
gtaagaaagcccgctagttattttagtgcagttgaacctccatacagactatatggttgtcagagcaatgtaatgtactcacggcctcaatcgtttgatggagttcctccgttactctctcggcgaatacttgaaactcttacctatcttgctcgccatcatccatttgtggcaaaaattttgcttcagtttaggctgcatcctcctgcattaagagatccagataatggctggtgttgcacctggcaaa

SEQ ID NO: 85011 - DNA, 254 bp, Glycine max
  Clone ID: 700954403H1
agcaaatgcagcatagcctgcctcgtcacaaaatactgaacgccgcagctctgtggttgatcgacgcattcttcacttcagtcccacaatgtctataacgcacagcctcaccacttcactctcttcttcttcctctgctttcttagctccctcttccttcaattccagaggacaggtttcgttgcctgtgaagagcgtgagcatttgcaaatgcgttgccacacccgaagctgagaccgcctacaagacagggg

SEQ ID NO: 85012 - DNA, 251 bp, Glycine max
  Clone ID: 700954404H1
tttcacaattttatcctcgaccagggacacctgctgcaaggatgaaaaaggttccaagtaatgtggttaagagaagaagccgtgaactgacaaatgtctttgaatccttcacaccatactctgggatggaaggcaaagtggaaagaatttggattactgatattgcatctgatggagttcacttggttggtcatacaaaaggatatatacaagttcttgtacttgctccagacaatatgctgggaacttca

SEQ ID NO: 85013 - DNA, 248 bp, Glycine max
  Clone ID: 700954405H1
gaaccatccaatgctgtaaattactcccttggtactgtatctgggccccaggatacagggataactccagagaaccgaacatgcaatcctaagagatgtagattttttggctgtacgaaaggagctcgaggtgcttcggggctttgtatcgggcatggtggtggacagagatgtcagaaacctggatgcaacaaaggtgctgagagccgaactgcttattgtaaggcccatggtggatggaagaggtg

SEQ ID NO: 85014 - DNA, 248 bp, Glycine max
  Clone ID: 700954407H1
atcagtgccaattttgtttcacccttgtgggagctacttttttgtctcagaagccggagccgtgtgtgtgggtagctcagctgctatgattatggtgattcacggtacgcttgctgctagctctccagctagtggtattgacgaccatctgccatatgcggatcatgtctattgcgggtctgctcctacttcgatgcagtgaaactgcatgcaccagagccttcctgagtcgagctatgcagcgtggc

SEQ ID NO: 85015 - DNA, 247 bp, Glycine max
  Clone ID: 700954408H1
gacgaaacttacatgcactttcttaagtgcacttctctgataattggaggtttatggcctataaagattattgaaatgaaattggtctgagaagaactctaaaattatgttatctattggtaacactgggatgttaatttccccggcagcaacatttttgcgtttcctttgagaagtgagcattggtgatagtagtctcaatcagttgaatctcttgtgtctatctcaagataatttgctagagctg

SEQ ID NO: 85016 - DNA, 251 bp, Glycine max
  Clone ID: 700954409H1
agcagaactgcttcaccttcttctcttctctccgcctccaccaccactccctcactctccactccctcaattcacaatcctcacgttgcctcgttcacatgaaactcctctcgccctccgtgttctcgctctctctctgaatcactcatccttataataaataaataatttctcgaagaaggagaaagaggttttcattgttgtggttgttgtagaagaagaagaagctgaagaagaatggagtccacaga

SEQ ID NO: 85017 - DNA, 248 bp, Glycine max
  Clone ID: 700954410H1
ctgtctcattctctttcctctttcctttttccttagaagaatcgaaaacgtcttcaaaaaaccaagccattattaatggctgtcgattccttcttccagaaagaacatcaaattcgggagtttgtggacgggaatggaaacgtagctgtcggtttgaagttgcataataaaccaagtaatgatggccttaaccgacagtttcctctagagattccgccgattctatttgaagagacttcacttccagc

SEQ ID NO: 85018 - DNA, 245 bp, Glycine max
  Clone ID: 700954411H1
aaaaaaggacattcattcatctatggctacccttattgctcccagcaaccactctccccaagaagatgctgaagctctcagaaaggcttttgaaggatggggaactgatgagaacactgtcatagtaattttgggtcatagaactgtgtatcagaggcagcaaatcagaagagtttatgaggaaatttaccaggaggatcttgtgaagcgcctagagtctgagatcaaaggagactttgagaaag

SEQ ID NO: 85019 - DNA, 244 bp, Glycine max
  Clone ID: 700954412H1
gtcaatatacaatttctgatctctgcgttccaatctaattgatcaatatgccttcaaacgatggtgtagttatcgtggtcatgggtgtcagcggtgctggaaaaaccacaataggtcggaagctggaaaaagagtcgaaatataagtatcttgatgctgatgattttcactcagaatcaaacaaagaaaagatgcgtatgggaatcccacttacagatgaagatcggatgccatggtttgaatc

SEQ ID NO: 85020 - DNA, 248 bp, Glycine max
  Clone ID: 700954413H1
cggactgatagcgccgtttagaaccgtcatagttgctttcttcctcattttccgattccgcaatgcaaagggtgtcccaaacctccaaaatctggaggaccgtagcctccaaagctagaataaacgtgttttccatcaacgacccttttgcttcgcgctccttctctgcggttcccgtcgtggcagcaaccaccagaaaattgcatcaaccggagattccgagcagtttccagaaatggggttcggtt

SEQ ID NO: 85021 - DNA, 250 bp, Glycine max
  Clone ID: 700954415H1
ttccctacctctcccttcaagatgcagatcttcgtcaagaccctcaccggcaagaccatcacccttgaggtggaaagctctgacaccatcgacaacgtcaaggccaagatccaggacaaggaaggaatccccccggaccagcaacgtctcattttcgccggaaagcaacttgaggacggccgtacccttgctgactacaacattcagaaggagagtactcttcacctcgtcctccgtctccgtggtggca

SEQ ID NO: 85022 - DNA, 250 bp, Glycine max
  Clone ID: 700954416H1
tatatgcagagtctcttgcacgctttcaaggagggtcacttacatatatcctttgtatggtttaggagagcttccccaggcatttgcacggcttagtgctgtttatggtgggacatatatgttgaataagcctgagtgcaaggtagaatttgatgaggaaggaaaggttgttggtgtcacatctgaaggggaaactgcaaagtgcaaaaaagttgtttgtgatccatcatatttgcccggcaaggtgagg

SEQ ID NO: 85023 - DNA, 254 bp, Glycine max
  Clone ID: 700954417H1
caaatatccttcagtagagtccttgattgagaaggatttgagtgtggacaaattagagatctcgagaagattgacacatccacatccacatcctcatgaagatggcaacaggagaaagattttagaaagacttgattctgattctcagaagttgacaaaccttgaaattaccgtgcaagatttgatgagcacgatagaaattacagagagcacaaagggaaaagatagtgagtatgataccgtgaaaggacagc

SEQ ID NO: 85024 - DNA, 250 bp, Glycine max
  Clone ID: 700954418H1
gttggcagcgaaagggtgagacaagaggcttcacctgtaatcagacaattgtggtcaatgcgagagtcataccattacaatgcaagtaaatgaaggacacaacagaccttgctcagacccatttttacagtggagtaaatggcagttgcttgattctcttttacctactggtggatttgctcattcttttggcctcgaagcaacagttcagtcccacttagtgtctaattccaatgaccttaagacattg

SEQ ID NO: 85025 - DNA, 250 bp, Glycine max
  Clone ID: 700954419H1
cgagaaagagaggaaattggcgtggcgtggcgtgatcggggcacagtctgaatctgaaatccatcttcaaaatctcaattcgatataggagggagctgtgccctgccctgacgttaaaaaaatgtcgctgaatatgaaaaccctaacccaagcattggcgaagaccgcggcggtgatcgagaagacagtgcatacgacggtgcaggatgtgacaggcccgaaggcacttcaggactgagagctgctcgac

SEQ ID NO: 85026 - DNA, 194 bp, Glycine max
  Clone ID: 700954420H1
agaatagctagttgaatttatttcaacctttaccaaatccaacataattgggtcatattggtaaataataaagttagtttttaatatgacccaatatatgttgggtttggtaaaggttgagataaagaatagctagttgaatttataagtaagaagaaaaaggggggaggacacaaaatgattgggtttgacag

SEQ ID NO: 85027 - DNA, 248 bp, Glycine max
  Clone ID: 700954421H1
ggtgtcttagctcaaacctcacctcaataatctttcgtgctagctagcttaatcatattccaattccaacagaaccaaattctgctagctagctagtacgtcaaaggaaataaaataatatggcattcagcgggacccaacagaaatgcaaggcttgcgacaaaactgttcacttggtcgaaggtttatctgtcgatggggctgcttatcacaagaattgcttcagatgcagccattgcaatggcctt

SEQ ID NO: 85028 - DNA, 246 bp, Glycine max
  Clone ID: 700954422H1
caaatatgttcgttgattttctccaaaacttagaggttgatacggatcctaataaaggcttagtgagtcacactatccataatgattttcagtatcatagccccaggctcacaacactagataggaactctgatagcacagaatctgagccaagggaaactggcaacagggttgtcaatgtgtccaggatacttgtgaccgaagtggatcttctgcagcctgacaggatccataatgggattgtgt

SEQ ID NO: 85029 - DNA, 91 bp, Glycine max
  Clone ID: 700954423H1
catttctaaagcacaatgtgatagtggctgttttgaccgctaatgacaactatggtattgcaacatgttcaatgaaacacaattaattttt

SEQ ID NO: 85030 - DNA, 247 bp, Glycine max
  Clone ID: 700954424H1
caaacggacaaaggaagtgaaagggtttagggtgtgacctgagatcaacatgttgcggaggcttctctattctcacctcaaaaccctagccgccaccgcttcttcttccactccccgatctgcttccgccgccgccagattcgccgctctctctcgctcctcccgctacttctcaacccagtccgaggatgctactgccatcaaaaagaaggttgaggatgtaatgccaatcgctactggtcacgag

SEQ ID NO: 85031 - DNA, 247 bp, Glycine max
  Clone ID: 700954425H1
atcatgcatggatccccattgtctgatgattcatctcatcattctgattcaggaattctgaatgatggtttcagcaatggagtggttaaccacactggaccaaagcccttggacaatgcattgtattcgcaatgtgtacttgctatgtgtactttagcaaaggatccttctccacgcattgcaaatcttggtcgccgggtactgtccataataggtattgaacaagtggttgcaaaaccattgaagt

SEQ ID NO: 85032 - DNA, 245 bp, Glycine max
  Clone ID: 700954426H1
ggtttagagaaggtgggaagcactggacggatgcagttcccattgggaacggacgcttgggagccatggtctgcggccacgtccattccgaaaccatacacctcaatgaggacacgctctggactgggacacccgcagactacactaattccaaggctccaccagcactttctcacgttagaaacctcgttcaccgacaacactatccccaagccactgctgcttcttctgccttaacaggaaat

SEQ ID NO: 85033 - DNA, 247 bp, Glycine max
  Clone ID: 700954428H1
aaaatctcttgttcaactcttaaggccatgtaaattattcttgaaaaattcaatgctcttatatgtttatcaaaattgttagaaaaagataaatttaattcaagcctatttttttcttcatagtaaatcttctgattttgtttttttgacttctattacatcaggaaatgaggagtcaatgaatcaataaagatcaacttcaactactgcaagatgttagtggtgcttttagaccaggaattttgac

SEQ ID NO: 85034 - DNA, 249 bp, Glycine max; identical to SEQ ID NO: 76445
  Clone ID: 700954430H1

SEQ ID NO: 85035 - DNA, 255 bp, Glycine max
  Clone ID: 700954433H1
caacaatataaagtaaaagtgttattattccaatataataataataataataataataataataataataaagttcattcaccacactatttaatattatcttaacacgggaagaacttgatttggcacaacatattattctctctcccgaagcaagcatgagggattaattctgatctgatttcgtttccaaacgcggggcctaatttccacctaagtttgataacttcgatttgtgttagaccaaacttttcg

SEQ ID NO: 85036 - DNA, 195 bp, Glycine max
  Clone ID: 700954434H1
gcccaaggtcttgtacatttgggaaagggcttattaacacttaatccatatcattctgatcgcttcttactgtcaccgacagcacttgctggattaattaccatgttgcacgcatgcctagacatgaaagctattgtgttgggaaaatatcactatgttctctacttcctcgttttggcaatgcagccagggatg

SEQ ID NO: 85037 - DNA, 249 bp, Glycine max
  Clone ID: 700954435H1
ccaagatctcttttggtgctaaggatgttgatgtgacggaatggaaaggggacattctggcagtgggtgttacggaaaaagatttggctagagatgcaaactcgaagtttgagaatgtgattttgagcaagattgactcaaagttgggtggtttattagctgaagcctcttctgaagaggatttctctggcaaagttggtcagtcaactgttcttagaattacaggacttggatcaaaaagggttggat

SEQ ID NO: 85038 - DNA, 247 bp, Glycine max
  Clone ID: 700954436H1
gcattggcttactcatgcctaaattagagaccatcgctccttcttggctactgtccttgttagtaggttcccatggtttgcccacagaagtgtagcttcaattttgaataatgctccttctaagataccaaggaactatcactcgagagagtttgtctttcattggaattacttgtatttcaacatctaatccttttaggaggatagtatatttgagctttacagttttagtcatggaattagacca

SEQ ID NO: 85039 - DNA, 246 bp, Glycine max
  Clone ID: 700954438H1
gtttatttgaaattaacaagtagcaaagatgtttggaatcatcggaggaaacaagggtcacaagataaaggggaacttggtgattatgcgaaagaatgtgttggatatcaacagcattaccagtgttaagggtgtcatcggaaccggcattaacatcattggaggagtcgtcgacaccgttactgctttggcgtcccacatctccatccagctcattagtgccaccaaggctgatggacatgggaa

SEQ ID NO: 85040 - DNA, 244 bp, Glycine max
  Clone ID: 700954439H1
gaagagccataatgcgacttttggaggacagcatggctgagaagatgcttgccagagagatcaaggagggcgactctgttatagtggatgttgattctgatggtaatgtgattgtgctcaatggtagcagcggagcccccgaatccttgccagagacgcttcctgtataatgcggttaatttgctaatactatgtacttaatttgtttaaaccatagtcatagtatgtcttacttgtcaatgta

SEQ ID NO: 85041 - DNA, 246 bp, Glycine max
  Clone ID: 700954440H1
atccaaaaggcatttggcacagcaggatcacagtatgttcaatgggctgcaaaaatggcggtgggccttaacacaggcgttccatgggttatgtgcaagcaaactgatgctcctgatcctgtgatcaacacatgcaacggcatgagatgcggagaaacttttactggaccaaattcccccaataaacctgccttgtggactgagaactggacatctttctatcacagtgtatggtggactgccata

SEQ ID NO: 85042 - DNA, 247 bp, Glycine max
  Clone ID: 700954442H1
aaaataatcaaagctttgtgtgatatggctaaagataatgcacatgttcctatgctttcccgcactcatggacagccagcttcaccaactactttgggaaaggaaatggcgatctttgctgcaagattaagcagagaaaggaaggatctgtctcaggttgagatagtggggaaatttgctggtgcggttggaaattacaatgcacatattgttgcatatcctgatgttaactggcctcacattgcag

SEQ ID NO: 85043 - DNA, 245 bp, Glycine max
  Clone ID: 700954443H1
gggttttggttttttttcattatcttcctcagtaagcaatgtcttctcccgcggagttttatcactctcttccgccaataacgaaggcatatggcaccgtttgcctgttggctaccgcaacttaccatcttggattatatcatccagcttacattgcactattctacgataaagtgttctacggttttcaggtttggaggttgttcacaaacttatttttccttggaccattctctatcaatttt

SEQ ID NO: 85044 - DNA, 242 bp, Glycine max
  Clone ID: 700954445H1
gcattagtgaacctcgtcttgtagccagaaagttcttggccagacctcagcatgagggtgttggagccgttgttagaagaagcatagggagatttgaactcaagtactttgatcctttccttgtcttggatgaattctcagtgactgctcctgctgggtttcctgatcatccacatagaggatttgagacggtcacatacatgttgcagggagctgtaacgcacgaagattttgaaggacat

SEQ ID NO: 85045 - DNA, 244 bp, Glycine max
  Clone ID: 700954446H1
gtggtgccggagagaaacccattccacttggtgagaacgttctgcagaagcatgctgcattctttgacttgaataaagatggtgtcatctacccatgtgagacttttaaagggttgcgtgaaatcgggactggggttttgctgtccgttggaggtgctattttcatcaatgtgtttctcagtcagagtactcgtcccggaaagtttccatctatactttttccaattgaaattaaaaatatcca

SEQ ID NO: 85046 - DNA, 244 bp, Glycine max
  Clone ID: 700954447H1
caagcctaaagaggaccaagaagtgaattcaaaacaggttgacttgtgtttgaatctatttgtctgtgtctgtcttcaaatggatgccatatttgctcattttcatgttgggttacctttggtagtttggtttgacatattacatttatgatttggtaggcacagttggggaaatgagaagacatttgttgtatacctaaatgtgcttctttaatattctttcaacacaagcctgagaattgtg

SEQ ID NO: 85047 - DNA, 247 bp, Glycine max
  Clone ID: 700954448H1
cgccgctttgtctgcagaggtccaagtgcccgaaactttcgacgacacggaggaggacgacggtgctgatggctccaccgccaccaacaccgtccccaccaccaagcctaagaaaggcaaggccgcattgcctctcaagagggacaggacgagatctaagaggttcttggaaattcaacaattgagggagcgtaagaaagagtatgacttgaagacagcaatatctttggttaaagaaacagctaaa

SEQ ID NO: 85048 - DNA, 122 bp, Glycine max
  Clone ID: 700954449H1
ggcacctgagctgctattgagcaaggggtatgatggagcagctgctgatgtttggtcatgtggggtgatcctttttgaattacttgcaggctatttaccatttaacgaccggaacttgatga

SEQ ID NO: 85049 - DNA, 251 bp, Glycine max
  Clone ID: 700954450H1
ttcagccacaacaaaaaagtaactccctttgatttcacactttgctcattttcgttttctgattttcccacataaataaatctctcccttcttcttctcttacactcttctgtttcagcaatcaatcaatttccccactattagggtttttcatttgaaatgtggagagccaataatggagccccttgaatccgaatcggttagttcctccgccaaggacccgctattgggtgaaccatcttcctctgttc

SEQ ID NO: 85050 - DNA, 249 bp, Glycine max
  Clone ID: 700954451H1
agaggaagaagaagaagaagagtatgggaacgacggtggcgggtctagcgccgggtctgtcacggaagctgaagaaggttctagaatctcggatcgatacgccagacctcttgtcttcgctcaacacgctctcttccttctacgatgacaacactcctcaggcgcgtcgcaacctccgatccaccatcgagaagcgcgccctctccatcaaccgcgaattcctcgacgcttcccacgccgcgcagtggg

SEQ ID NO: 85051 - DNA, 244 bp, Glycine max
  Clone ID: 700954452H1
ctagaaacagtgtgatgaaaatgaaggtccttgttttcttcgttgctacaattttggtagcatggcaatgccatgcgtacgatatgttccctctccgaatgaacactggctatggtgcccgtactccggaggtgaaatgcgcaagttggaggcttgctgtggaagcacacaacatctttggctttgagaccattcctgaagagtgcgttgaagcaacaaaggaatacatccatggcgaacaata

SEQ ID NO: 85052 - DNA, 245 bp, Glycine max
  Clone ID: 700954453H1
ctcgagccgcaccaattcattctcatacattccttcttcttcttcttcttcttcttcttctttcacaatcacaatggcgcgagtggatctggatggtaaccccatcatgccacttacgatctgcatgatcggcgctggcgggatcatcgggtcgcacctctgcgagaagctcatgtccgaaacccctcacaccgtcctcggcctcgacgtctacagcgacaagatcaaacacctcctggatcccg

SEQ ID NO: 85053 - DNA, 223 bp, Glycine max
  Clone ID: 700954454H1
gctaactccagcaacaacaacaatagaagaggaagaactaggaattccttttgttgttgttgttgttgttgttgtccttgcccctctcctcttctttgatgggttccgaggtctccaaacaggttgatagacgaaaggcgatccacacagagggaaaaactctgtctgatcttagaaactctggggaagattaccctggctcagattatcatccctcagacag

SEQ ID NO: 85054 - DNA, 72 bp, Glycine max
  Clone ID: 700954455H1
catttctaaagcacaatgtgatagtggctgttttgaccgctaatgacaactatggtattgcaacatgttcaa

SEQ ID NO: 85055 - DNA, 99 bp, Glycine max
  Clone ID: 700954456H1
gctgctaagcatctatatcctagtctgttttcatggcaaaaacaacatcacataggctatcgtctcaagtcctaggttctcggaccacctaagtgtcca

SEQ ID NO: 85056 - DNA, 245 bp, Glycine max
  Clone ID: 700954457H1
gagtttttgaagtacctcgaccagttcgggaagactaaggtacacatcttggggtgcccgtacttcggacaccccaacccacctgccccttgtgcctgtcctcttaaacaggcttggggcagtctggacgccctaattggacgactcagggcggccttcgaagaaaatggaggccgtccagagtctaatccatttgcaactagggctgtccgaatttacctcagagagataagagaaggtcaggc

SEQ ID NO: 85057 - DNA, 243 bp, Glycine max
  Clone ID: 700954459H1
tatagcccaagccctatacaaccaaaccctaacacacacccatttgattcagtttccatggctagcctcaaggttgcatttttggctgcagtgctctgcatggttgtggtgagtgcacccatggcacatgcagctatcacgtgcgggcaggtgacgaatagcctgatcaattgcatcggttacctccagaacggaggaacgccgccgtcgggatgctgcaacggagtgaagagcctcaatgcc

SEQ ID NO: 85058 - DNA, 243 bp, Glycine max
  Clone ID: 700954460H1
cctcaagtcaaccttggttctggaccacacatcgtaacatcatcgagtgtctgatctcgttcgcaccctgcttcttagtcctctctctcaccatttaacaattacactggaagaaaaatgggaggttgtctatcatcgaagcctaaggcagtagataatggctcagcttccggcaataccaactgtttcatgctgtatgcaagagcactctcaatcacatggggagaaactccagaatattgg

SEQ ID NO: 85059 - DNA, 243 bp, Glycine max
  Clone ID: 700954462H1
agaagatggagatgtatcagatctggagcaggagaatagcgttgggagcgttcgcgtttgttctgcttttcctatcggcctcagcagacgacgtcgttgtgctctctgaagataacttcgagaaggaagttggtcaggacagaggagctctcgttgagttctatgctccttggtgtggacactgcaaaaagcttgctccagaatatgaaaagcttggtagcagcttcaagaaagccaaatctg

SEQ ID NO: 85060 - DNA, 247 bp, Glycine max
  Clone ID: 700954463H1
tgaattatgaacatcaactttaagttctatacatattacactttccatattcacaaatgtatgaaacatgcacaaaacaccttcttcgtcaataatttgaattgacctatattgaacttgaccattgaattcatatacaagacaacgataccatagtgcagtaattataaacataacatcatttttgtaattgatgattgtattgcggtgattatgtttgacagcgttattgttggattcaagagta

SEQ ID NO: 85061 - DNA, 249 bp, Glycine max
  Clone ID: 700954464H1
catcatcatggccacctctgctattcagcaatcagcattcgcaggtcaaactgctctgaagcagctcaatgagttggtccgcaagaccggtggcgccggcaaaggtcgcaccaacatgcgccgtaccgtcaagagtgctcctcagagcatttggtatggccctgatcgtcccaagtacctgggtccattctcagagcagattccgtcatacctgaccggagaattccccggtgactacggatgggacac

SEQ ID NO: 85062 - DNA, 248 bp, Glycine max
  Clone ID: 700954465H1
ctggaggccttgattgaattacacaatatgactgggacctttgcaaggaatattcagcacttattttctgtttctgatgtccggtttttaatggatgtgcttaaatctgtgtacttgccttatgaatcgtttaaacagagatatggacaaatggagcgtgccatcctttctgctgagattgcaggagtagatttaagaggagctgttattcgagggttgggagcccaaggtgttgaactcagtgaaac

SEQ ID NO: 85063 - DNA, 249 bp, Glycine max
  Clone ID: 700954466H1
ctgaaaaggccgtggaattggtggatgagaacactatttgtgttgctgctatccttggttccacactaaatggagagtttgaagatgtcaaacgcttaaatgatctcctaattgaaaagaacaaaataactgggtgggacactcctattcatgttgatgcagccagcggtgggttcatagccccatttatttacccagagcttgagtgggacttccggttacaactagtgaagagcatcaatgttagtg

SEQ ID NO: 85064 - DNA, 243 bp, Glycine max
  Clone ID: 700954467H1
ctgatttacaaaaggttacaaacttctcttgcataaagaatggcatcagcaacaataaggaatgcagttgtcacgggagcaaacaaagggataggatttggaatatgcaagcaattggtttctaatggcatcacagtggtgctaacagcaagggatgagaaaaggggtcttgaagctgttgaaaagctgaaagagtttggtgtgtctgatcaagtggtgtttcatcagcttgatgtgactgac

SEQ ID NO: 85065 - DNA, 69 bp, Glycine max
  Clone ID: 700954469H1
cccttttgtctgaggtgtgtgcattcttgtttaactcctctttgtacctcagacatcccagaagggaac

SEQ ID NO: 85066 - DNA, 242 bp, Glycine max
  Clone ID: 700954470H1
gaaagggcttcgcataagcgaggaaagagtggttgttgattcatctcctgagatgcctgttgattcaatccaggtacagatatccagtgtggactccaaatttgcgagtgctgtatcagagagtggtcagatcagcattgacggaagagtgaagtttggagaaccccacctgacatgtgtggggtcttcctatgtggatgtgagcttataagggaatctaatcctgtgccggcaggtggatc

SEQ ID NO: 85067 - DNA, 244 bp, Glycine max
  Clone ID: 700954471H1
tcacaactgagagaaatagcaaatgggttggagaagagtggccacagtttcttatgggtagtgaagaggccaacacaagacgaaaaaacaaagcagattcacgacacaacaacaacaacaacaacaatggatttcgatttgagttcggtgttgccaagtgggttcatcgagagaaccaaggacaggggcctggtggtgagctcgtgggccccacaagtggaggtgctgagccgcggctcggtgg

SEQ ID NO: 85068 - DNA, 240 bp, Glycine max
  Clone ID: 700954472H1
gttcatcgaaaactgtggatctacctctgcctccagagtggggattggcaccaagtagctattatgttcctttcttccccatcattggaataccttgatcatgggctcaagacttcaagtgatttgtaatcacttgattaataatacttgtaggggataatagactgttatactgtcttatatgtgacatatgattattatagatatgtgtcatgtgtagtgtgaaagaatgatgccact

SEQ ID NO: 85069 - DNA, 244 bp, Glycine max
  Clone ID: 700954473H1
gagcatgacctctttgaatctttcttccaacaatcttcagggcgcaattccaatagaactgtcgcggattggcaatttggatacattggatatttcaaacaataacttagttggttccatcccttcttcccttggtgacttggaacatcttctgaagttgaatctaagcagaaacaatttaacaggaattattccagcagaatttggaaatcttagaagtgttatggaaattgatctttcaaat

SEQ ID NO: 85070 - DNA, 244 bp, Glycine max
  Clone ID: 700954474H1
cggctcgagacctcactttgttttttttctctgcagtaatagaaaaaaaagaaagaaagaagaagaagaagaagaagaagaagaagatgttgagggttgcagctagaaggctctcttctctctcctcctcctctccgtggcggcccaaccacgccgcttccgcttatgtctctcgaaacgcagtcgttgatgaccgcagatccgatccttcctcccatcccctttttcccttcagaggttttgc

SEQ ID NO: 85071 - DNA, 241 bp, Glycine max
  Clone ID: 700954476H1
gctaagccaagattaaagaaattatctgatttaatccttttattcttattgttcagtggttatctgggaagttcattgaatgtcttttctgaatttcttattttgaaattgaattgcaactgatatctggactagaagcatttgtattgatatcttataatgatattatccttttattcttatttttcagtggtttatctgggaagttcattaaatgtcttttctgaatctggttgaattt

SEQ ID NO: 85072 - DNA, 244 bp, Glycine max
  Clone ID: 700954477H1
gattgactgaggcgccagtacctttcacatccactgatgcctagtgggtctgatccaatccgaaaacccactcgcctttgttgcccgaaaaacctttctttctgcttctcccatccatccatggcttctggaatctcctcatagttctttcagctgcctataccctcgctctttgcctctcacacactaaaagaaaccatgaaggttcggtcatctgtgaagaagatgtgtgaattttgtcaga

SEQ ID NO: 85073 - DNA, 245 bp, Glycine max
  Clone ID: 700954478H1
gtttcttctctgcaccctttgggatctcttgcatagaccaaccccagaagaaggaaaaaaataaaaaataaataaaaatcaacccttttttgtaaatccccaccttttgttctgctaaagaatttatttttcctttttagttcctgcaatttatctttctggatcctaattgggtttgatctttctctttcaatttggtgattatgttgaaaattcttgaatttttatggtggttgaattttttt

SEQ ID NO: 85074 - DNA, 246 bp, Glycine max
  Clone ID: 700954479H1
gtgagttgcaggcagtgtcatctctcctttgacgacaagatgagcatcccaattccccatcggcagttattcatagacggagactggaaagtccccgtcctcaagaatcggattcccatcatcaacccttccacccaacacatcatccgggatatcccagcagctactaaggaagacgttgatctcgctgtcgctgccgccaaagctgccctctcccgcaacaagggcgccgattgggcctccgct

SEQ ID NO: 85075 - DNA, 241 bp, Glycine max
  Clone ID: 700954480H1
gcaggataacccaaaccggaacagaagcagaagcgaagatgggtggttccgttttcactcacttcctcgttctcccttcctcttcttctctctcttttcccactctcttcccatccaaattccccaccaaacccatcaatgaatccgttcccttcacgcttatctgcaaccaattccctttcaaactcactacttcgcggccttcccaattctcagctcctcctcgttactcatgctctgt

SEQ ID NO: 85076 - DNA, 242 bp, Glycine max
  Clone ID: 700954482H1
tgaaaacactgatgaggtgttactactgaatacttcttgaatatgattctattcttatttcagttcaatttaataaagaaacgtatgctattttttcacagtttgatgtccatctcatgcttgtttctcttgaccaactaagtacaccaagtttgcagcaaccttacctttgctgtcgaccaactttgtctgtcaagcacctttatgaacacgttgctcgtcagacacctttgccggttgaa

SEQ ID NO: 85077 - DNA, 184 bp, Glycine max
  Clone ID: 700954483H1
ctcaaacactagcaaagggaaggaaaagtaccttccccaataacccttctctccgatttggcttctctcatcggagggaaacaatcaatacaagaaaaccaaaacccacaaaaagattgtaacaaagcaagtatgaaaggataagtactaggttccgcggttcctctcaacctcacggtgggtg

SEQ ID NO: 85078 - DNA, 240 bp, Glycine max
  Clone ID: 700954484H1
gagaagcgtgagatatatgatcagtatggtgaagatgcgcttaaggaaggaatgggtggtggcggtggccatgatccgtttgatatcttttcatctttctttggaggtggaagtagtcgaggtaggaggcagaggcgcggagaagatgtggttcaccctctcaaggtctctctggaggacctttatctcgggacttctaagaagctctccctctccagaaatgtcatatgctccaagtgc

SEQ ID NO: 85079 - DNA, 241 bp, Glycine max
  Clone ID: 700954485H1
gctgcccactggacaggagacaatgctgctacatggaatgatttggcatactcaatccctgcgatattaaattctggaatctttggaattccaatggttggagcagatatatgtggtttcggaggaaatacaactgaagaactttgccggcgctggatccagttgggggctttttaccccttcgcaagagatcattcagacaagaactccaataggcaagagctttatctttgggactccg

SEQ ID NO: 85080 - DNA, 225 bp, Glycine max
  Clone ID: 700954486H1
cgaagacccctttttctggttattaacagagtcataaaaaaccaaagttttctattctctgtagctcacatggtgggctaagaatatctgactttggggtggaaagtatggtatggcaaggagagtttgagaactgaggtcttcaacttgagctttgagaagcttatgatggttcactctggcggagatactgggaaacgcgataccattgaagctggcgggatc

SEQ ID NO: 85081 - DNA, 240 bp, Glycine max
  Clone ID: 700954487H1
ttccttctacgtcttcaactcgactaccactgttaattggaggtttatggcctatatagattattgagaatgagattggtctgagaagaactctaaaattatgttatctattggtaacactgggatgttaatttccccggcagcaacatttttgcgtttcctttgagaagtgagcattggtgatagtagtctcaatcagttgaatctcttgtgtctatctcaagataatttgctagagct

SEQ ID NO: 85082 - DNA, 240 bp, Glycine max
  Clone ID: 700954489H1
tcaaaacaaaaccaaaacacagaaaaaaaaaaaaaaaagagtgtgggggaaacaaaagagacgagattgtcgaacttggggtccttttttgcaacctgcgaggctgcgactgcgagcgagcgaaagagagagagaatcgaaggcgacacacagcttgcatccgattccgagaagaagacggggcttctctttcgaatacaatctttctgctacatgatgttgaacaaatgatccagaatt

SEQ ID NO: 85083 - DNA, 241 bp, Glycine max
  Clone ID: 700954491H1
gcaataattcacaaacacaaaaccgccaccaccaacacacaatggcacgccaagtgattgtcatcgccgctctactcatggtagccattgttggtgtggccctggccgatgaagccccatcagcatcacctaagtcagcaccaacaccatcatcattaccaaaagcaccaacatcatcaccgaaggcaccggcaccatcatcctccaaggcatcaccaccaacctcatctcctccgacaat

SEQ ID NO: 85084 - DNA, 240 bp, Glycine max
  Clone ID: 700954492H1
gtgttgtgtgtcttcccttggtgttccagtttttatttgcagccgccatgtgcggaatcctcgcagtgttgggttgcgtcgacaactctcagaccaagcgcgctcgcatcatcgaattgtctcgcaggttgcggcatagaggtcctgattggagtggcatacattgctatgaggattgttaccttgctcatcaacgccttgctattgttgaccctacttcgggggatcaactttgtacaa

SEQ ID NO: 85085 - DNA, 240 bp, Glycine max
  Clone ID: 700954494H1
ctcactggaagccttgttgtgagtaagggaaaggcttcctgcactgagcaccaagttgaaacctcttgattctttgcttagaattccacagaatatggagactgttcttttcaatgactccccacctttggagttcaagggtatgagcaaggaggaggaagactcattgctagggcaagttgaaatatggaggtacatgacatgcttcacggactccgtggccttgaaatccgtcataga

SEQ ID NO: 85086 - DNA, 244 bp, Glycine max
  Clone ID: 700954495H1
cttttctaatgcccattgaagatgtattttcaattcagggacgaggaacagtagccactggacgtgttgaacaagggatcattaaagttggtgatgaagtggaggtgttgggtctaatgcagggtggtcctctgaaaacaacagtaactggagttgagatgttcaagaagattttggatcaaggacaagctggtgataacgttggtcttcttctccgtggtctgaagcgtgaagatattcaacg

SEQ ID NO: 85087 - DNA, 247 bp, Glycine max
  Clone ID: 700954496H1
cctcgagccgaatcggctcgagcttttcttcattttctctcttccactcaccgagtcacgcactcgcctcgactcgtacggactccgatcccccccgagtcacactcagccagcaccaccgcccgatccgacgatgtctcgcgcctcttccgccgcctccggcgagatcatgctgttcggggtcagagtcgtcgtcgattcgatgaggaagagcgtcacagtgaacaacctctcacagtacgaacat

SEQ ID NO: 85088 - DNA, 329 bp, Glycine max
  Clone ID: 700954501H1
gcaaaggattctacccgccgctcgatgggaattgcgcttcaaggcgtctcgtagggctaatccgcctcacgagggtcaccaacggcacgtgcctttggggggccgaggcccctactgctggtcggcaaacggacggcgggcgcacgcgtcgcttctagcccggattctgacttagaggcgttcagtcataatccaacgcacggtagcttcgcgccactggcttttcaaccaagcgcgatgaccaattgtgcgaatcaacggttcctctcgtactaggttgaattactattgcgacactgtcatcagtagggtaaaactaactgctcacg

SEQ ID NO: 85089 - DNA, 326 bp, Glycine max
  Clone ID: 700954502H1
ggctcgaggccgagtgttacattccttttgaaattgacaccacgcaagatggtggaagtgatgaagatagttgtctgcaaggtggagtctacactgttgatggggatgagactgtgccagttctaagttcaggctacatgtgtgctaaaggctggcgcggaaaaacaagattcaacccgtctggtatgcgcacctacgttagagaatatgatcattctcctccagccaaccttctagagggaaggggcacacaaagtggtgctcatgttgacatcatgggaaactttgcattgattgaggatgttataagagtggctgcggagcca

SEQ ID NO: 85090 - DNA, 295 bp, Glycine max
  Clone ID: 700954503H1
gctacaagcccaacaaacttggttttaattggtataggcgtgccaaggtcttgttaattttgagcgttaagtgctgcaactaatcagatcccaagaccttggcctaccttgccatacagaaaaaaaaaaagcaaaaaaaaagccaaggtttggagccaacaaaaataaacacaaagcacaagtcatggaaagaataatggttggaagtgcaacaaaggttgcttacaccctcttggccactttcgccattgtcattccatgccttgaggctggcattgccgagtttgacgatttt

SEQ ID NO: 85091 - DNA, 297 bp, Glycine max
  Clone ID: 700954504H1
aagaattcgctatcgctgggacagtttttgtttgacagcacagcactcggaaatttctggcgatctctgcgttttcccctattttttctgaatctaacaacaaacattcctctggcaacaatcaatactattaataagagttccttccttcactctcacccaagccaaagaaaggaacaagaacaagaccaacaaagtaacgtgaaagagaaagagatggaggaaattgttccagtggtggatttccagaggctttcagaggaagaggagcgcaagaagctgaggaaaacatgtgag

SEQ ID NO: 85092 - DNA, 323 bp, Glycine max
  Clone ID: 700954505H1
ctcaaacacaggttgatagcaaagaatagcacagaggaaaaatgaaacttaaaccagaacaatatggaggaaataataataatatagaatcaaacgaagtagctttggtgcatctttaagggaagaggcattcagaattttgcaatcaaaatgcaatttaaaatagtacattagtgtcaaaactcaaaagcttctggttccaatgatcataaacattgctatcgagctttaataccttatactaaaatcagggtacaaaaaatgagaataatagaagatggatgttcgcctatacaagaataaaagaatagagtgaagcgcca

SEQ ID NO: 85093 - DNA, 287 bp, Glycine max
  Clone ID: 700954506H1
aagtctcaatttcgaaccccatttcttgtttctttttctcttttgttattcatcttcaacctcaccccttcatacgcactctatggagcatccacacccgtgcttcaactcactccctctaacttcaagtccaaggttctgaattcaaatggagttgttcttgttgaattctttgctccatggtgtggacactgtcaggctctgactcctatatgggagaaggcagctactgtgttgaagggtgttgttactgtggcagcaattgatgctgatgctcacccgtcttt

SEQ ID NO: 85094 - DNA, 317 bp, Glycine max
  Clone ID: 700954507H1
ttttcccttttcagctttcattggtgtggcctagctgttttctcaatgagaaagccttcatctctacaaagcgcacttttgcgctttggggttcccttgttgcttgttatcaccttctgttatgctacttctactgctgcagcaacaactcaagtttcagggaatgaagagctgccaaagacaaacctaaatgggcatgatgaagaagcaaaattcggattttttcatcataaaccaatattcaagaaacatattccaattccagtatatgaacctgtaacaaagccatttccagtgtataaacctatacaaagcca

SEQ ID NO: 85095 - DNA, 309 bp, Glycine max
  Clone ID: 700954508H1
tgcgaaaagaagagagtgcagcgccaaggcaatgggaaggagcactttggctttggttctcgcgattctgatctctttgcagggaaccccccacgttagatccgatgcctccgatcatcgttacaaggacggagactccgttcctctttacgccaacaaagtcggtccctttcacaaccccagtgaaacgtatcggtactttgacctgccattctgtgtaacaggtcatgagaaagataagactgatgccctcggtgaagtgttaaatggcgatcgccttgttagtgctccttatgaacttagttcaag

SEQ ID NO: 85096 - DNA, 314 bp, Glycine max
  Clone ID: 700954509H1
ctttttctctctctagaattttttttttctctctctctctcccatctctcggaaaatttttcagagcttcctaaagcctttagaattctctggaacctttttgttcgtccgccgaggatcgcaattcctccaaatcgtcgtcactcgtcgcttagttcggttctaactgcatgaactggttcgggaagctggattcatcatcgtcgaacttgaacttcaatcacttcgttacttgtctgttgatttttatcctccatttttcgcctcaatcgctctcttccaccttcgatagtaacactaatctcgatttaatt

SEQ ID NO: 85097 - DNA, 311 bp, Glycine max
  Clone ID: 700954510H1
gcaaattctggtgcccgtttaggtgtagctgaagaagtcaaatcctgtttcagagttggttggtctgaggaatctaatcctgagaatggctttcagtatgtatatgtaacacctgaggataatgctcggattggatcatcggtgatagcacatgagttaaagcttgagagtggagaaaccagatgggttatagataccattgttggcaaggaggatggccttcgcgttgaaaacttgagtggaagtggggctattgctggtgcttattcaagggcatacaaggaaacttttacactgacatatggactggt

SEQ ID NO: 85098 - DNA, 313 bp, Glycine max
  Clone ID: 700954512H1
ctttctttttcaaaaccctcgctctcaccgtcgcgccggaatcttccccggcaatgtcggcgccggcggaggctccttccttcactgcctctcctccgtcagagactactccctcacctaactccactgccctctctcctccgcctccctccaccatcaatgccaccgtttctcctccgccgccggaggccctcccctccgaccagtaccgttaacagcgggttgtcgacgggtacagtgagcggaatagttataggggccgtgttaggttcggtgggtatgcttatcattgggggcattttctctgcttcta

SEQ ID NO: 85099 - DNA, 314 bp, Glycine max
  Clone ID: 700954513H1
gttttcttcatatcttccttgtcactgcccgtgtgtcgccgccatggccaccgtcaccacccaagcctccgccgcaattttccggccatgtacctcgaaatcgaggtttttgaccggctcttccggtaaacttaaccgggaagtgactatgcggccaatggggtgccctccttctgcctctttcaaggttgaagccaagaagggagagtggttacctggcttggcgtccccaacttacctcaatggcactcttcctggtgacaatggatttgaccctctggggctagctgaggacccagagaactgaggtggta

SEQ ID NO: 85100 - DNA, 305 bp, Glycine max
  Clone ID: 700954514H1
cagcaatagagtttctaagttcatttcttgtgctgatgttcttctaccctttttgccactcactcgacaacaccataaccataaaccaccccattagagacggcgacgttttggtctccaacggtttaggaaactttgcgctcggtttcttcagcccgcgaaactccacaaaccgttacgttgggatttggtacaacaaaatctcggaacaaacggttgtgtgggttgccaacagagacactcctcttaacgacacttccggtgttctcaaaataagcaacaacggaaaccttgtactccacgac

SEQ ID NO: 85101 - DNA, 209 bp, Glycine max
  Clone ID: 700954516H1
gttctatggagaatggtgttgatgggaagtttctgaccatgatttttccggaggatgaaatggtgaagcttaaatctgagctcaagataattggtcttttgcttgagaataattaagttttaatgagattaaaagcatgtttgactttccgttcatcttgttagcacgaatttcaattttaaattcaatggtcaaccgtatattaacgc

SEQ ID NO: 85102 - DNA, 325 bp, Glycine max
  Clone ID: 700954517H1
ctctgggcctcttcgggtgttctccgatttggcctcaattccgccattcctttttttgcttttcttttattcctcttttaatttctttttctttttcatggaccgcagatacagagactatcaccatcgtcctgctcatttggcacatgcttctccccctgaatactttgtccgcctggagaacacaacttacaaagacgatctatatttaaggaagaggacaaggatgcgtcggtggctttgttgtacttgtcaggtggaagagtcttacccatcaaatgagaatgaacacctgaaaagcccaaggaattatggagatgcaacc

SEQ ID NO: 85103 - DNA, 317 bp, Glycine max
  Clone ID: 700954519H1
ttggatctctcactagttttagagagagagagagattcagaggaagagaaaaacgtgtggttatgtgattgtggaagagagaactgagacggcattgccaattctcccttgatctatgaaactgaccctgcaaatctgaggccacaatcggtagagattgtttcattttcatgacaaaaaaaaaaagcacatttcagctctaagcctctaaccttatgagttttgagctggtttggtaaactgtgtttctcttccaatctattccctttgattccattggttcatctcaacaaacccttttggatgtctaccctctg

SEQ ID NO: 85104 - DNA, 310 bp, Glycine max
  Clone ID: 700954520H1
gggagaagcatgaaaatcggagacaggaagaagaagaagagcatccccagcgacgaatgaatgggcaattgcggaagcagagaggaatctgccgtagtttccaaggctcaagttgttcagcagcttcaccatgcgacgtcgttgggcgccagtgccaggaccgacaagaagcacgctcacaggcacaatctcagcgagtgcgcttcggatctcagcgagtcctgttccacaccgcgcggtaacagtagcagcaacacgctgctctacacgcacgtcatcgctttcacgctctacgagttggagaccataa

SEQ ID NO: 85105 - DNA, 314 bp, Glycine max
  Clone ID: 700954521H1
gagcacttgatgaccgaaaaggaagagcttcttggacaagtccatcatttgagaaccgaactcgcttcgcttagggctgccaaagacaaccaggttgccgattatcagaggcttttggctgaggaaacccgcaaaaatgaagctcttgccgaagaagttgagaaattgctgaagcttcgccaggaaggagcatgtcatgatttgaattataacagtaagatcatgactgtagatggtcagtttaaggctaactctaacagctcatctataagaatgacaagaaaacgtacaaggcaaaatactttggagaaaga

SEQ ID NO: 85106 - DNA, 292 bp, Glycine max
  Clone ID: 700954522H1
agaaaaaatgggttcttcttcttctatgtggacggtgtgtgtgattttggcatcactggcctctgcagcactctgtgccaacccacgcaggccagtggatgtacaatttggccgaaactacgtgcccacatgggcctttgatcacatcaaatatttcaatggtggttctgacattcagcttcatcttgacaagtacactggtactggcttccagtccaaagggtcttacttgtttggtcacttcagcatgtacataaagatggttcctggagattctgctggcacagtcact

SEQ ID NO: 85107 - DNA, 315 bp, Glycine max
  Clone ID: 700954523H1
gcttcatccccagaataaatcacaccccccattgcaatgacccccagcaacaactcttctgcatcttcaaactcccttttggcttttctaagtgctgtgattctttctttcatctttttcttcaggtcctaaagcatacttgtgatttcctccattatttcctttgagatttggacagtagttggtcatacacccaattctaaattagagttgggatgtctggaggagtagtttgatacagtgatgcatctccacagatacttgagtaaagctatatgctgtggtgtagatttttactatggagtaaatgcaagt

SEQ ID NO: 85108 - DNA, 308 bp, Glycine max
  Clone ID: 700954524H1
ccctcctcctcttcagagtagcattgttcattcacactccctctctggctttcattctttggcattgcgaaaaaacgagaactcagaaaaccgcaacaaactcacactcactcacaagaagtagtaacaacatcaacaactctctcatcatcatggcagttgaggctcctccgcacaacatgaatctcttcccctcgcagttactaacctccagagaaatgatgaaaccgaatctcggcttctacaccgcgcagaaacggaaggcggcggtggcgcgcgccgccatgcctattcttccgtcatcaaag

SEQ ID NO: 85109 - DNA, 313 bp, Glycine max
  Clone ID: 700954525H1
gcaaatcacgcgaacacaatagttgtagagtatagagtctgtcgagatctcattcatgatcggtgataattgttgaagagagagagacagagagagagagagaggatgggttgttgccaatcatcgatgttgctgagagtgggagagagggagactcaccctgaaaaggagaaggaaagggaaaaggaaaaagagcaagcgtacggaaaccaccagaggcagtctgagggaggagagggcgacggcgagaaagaggtggttgatttctcgttctcggagttctcgctggcggactcgaaggcgccaccaacaa

SEQ ID NO: 85110 - DNA, 313 bp, Glycine max
  Clone ID: 700954526H1
accctactcattctccatacctcaacgaagaggttaaagagacggcaacactttgctgtccgccttgaccgagcagagcttcgtcttggccctcgattttgccctaaagtactctcagtcacaacagacaccgtcgtcgtcgtcgtcgtcatcaatggcaccgaagcagaccaaggctgagaagaagatcgcttacgatgcgaagtggtgcgacctaatggaggagtacggccagatcctcgttgtgaactccgataacgtgggatcgaaccagctccagaacattcgcaagggtctccgtggcactccgtcg

SEQ ID NO: 85111 - DNA, 315 bp, Glycine max
  Clone ID: 700954527H1
ctccacccacccagcatatctctctattcctatttattagcacccctcacattaccttgtgtcaccaactactttgactcctttaccataccattacaataattatcaaacctaaccagtaaaaatggtgaccgtggaggaaatccgcaacgctcagcgttcccatggacccgccaccatcttggccttcggcaccgccacgccgtccaactgcgtctcccaagccgattaccctgactactacttccgcattaccaacagcgaacacatgactgatctcaaagaaaagttcaagcgcatgtgtgaaaagtccat

SEQ ID NO: 85112 - DNA, 310 bp, Glycine max
  Clone ID: 700954528H1
ggcagtggtagttgccaaactagtagcaagaagtaagtcacgtttttctccgttttcattcatcacaatattaaagcttttagtttccttcagtatgggggacacttacgttttggccacaccgaagcgcaaccgttccgatgacgtggacggcggcgaggcgaagaagctgctgttgcagcagggcgaggcagacccggcggcggcgctggcgagcgcgcggcacgagttcggggagcacggcggggtgaacatgtcgatcgaggcgtcggcgacgttcacggtgatggagccggagacgagcggcgca

SEQ ID NO: 85113 - DNA, 311 bp, Glycine max
  Clone ID: 700954529H1
gatggaacatcaaccaaaacacattatgtaagatttgcctcagtcttatgaggacctatgtatcacacctgttttttttggcaatattaagttggaactgaaactaattgatcataatagtgaattcattacttaaatttattttaatatgttgaaattggttaggatgattgtacctggttagtcatcagttttcaagtttttatttacttgttagcttctcagtatgtcagatcaaactttttcacaggttgacctgcatatatgctgcctgtaaaatagaagaaaatcatgtgtcagctgggagcttg

SEQ ID NO: 85114 - DNA, 311 bp, Glycine max
  Clone ID: 700954531H1
ttcagtttggtctatttaaaaaataataattcaatcatttattttcactctaagaatataattcttttgaaacaataattgtttttgaatttgggacacgaatagaaccattttttttattaattatatttgatacgtgaaaacttgtttcatttcttggaaagccaaaggataatatattatagatcataaaagaccatgatatttgacacaagatgtatcaaacatcaggccaaattaaaaagataaatagtgacccatagtatcccacatggacttaaacggacccaacatacccaataaatgtacag

SEQ ID NO: 85115 - DNA, 301 bp, Glycine max
  Clone ID: 700954532H1
ctcgagaaaagcagcatagtgagatactacgtatactacgtagtactacacatttcatttgcctcttgtagtagccatggttttccaaacaaacattaatcctcacttcgtattgtttcctctcatggctcaaggccacatgatccccatgatggacattgcaagactattggcacggcgtggtgtgattgtttccatattcaccaccccaaaaaatgcatcacgattcaattctgttctttctcgtgatgtttcatcagggctccaatccgggtagtacaactccattttccatcccaag

SEQ ID NO: 85116 - DNA, 209 bp, Glycine max
  Clone ID: 700954533H1
cttaattgaaggaagcagtttagcttctgttgattctagtgggttgtctgatccctatgtggtgtttacgtgcaatggaagaacaagaactagttcaatcaagttccagaagtctagtcttacatggaatggtgagtgtcatgtcatgatttattattgtctgttttacaacttggatcaaacctctgaaaccggtgatctaatcaaca

SEQ ID NO: 85117 - DNA, 290 bp, Glycine max
  Clone ID: 700954534H1
catgcttcacggactccgtggccttgaaagctgtcatagagcttcgtatagcggacatactagaccgttatggtaaaccactatccttgtcgcaaattgtggagaacatagaagacgcaccctccccagatgcctctcttctccagagagtcctgagagtgatggtgcgcagaaagatcttcagtgcacaagaatcagagacaggagaaaccctcttcggcttgacacgagcctcgaagtggatccttcgcgacacgaaaatgaccctagcacccatgttgctgctggag

SEQ ID NO: 85118 - DNA, 315 bp, Glycine max
  Clone ID: 700954535H1
gatttacctgttgaaggtttggtgtgttgatcaaaaaggattgctacatgatattaatgaaatcctgtacaaccttgaacttattattcagtgataaagaacatgtctaacacccttccatctggggttggcatcgctttgactctctgaataataagttcaaggttgcacaggatttcagtggatgccgatgtgagggatgtaagaatgtccatggcaagaaagaagattatgttgcatttggacatacttcgagtaaagaaagggtgagcagtattgttgaagaaggatcagactgcactattcacaataact

SEQ ID NO: 85119 - DNA, 319 bp, Glycine max
  Clone ID: 700954536H1
gcttttccttttctcattattcttctctctctctccaaagtccatactttttgatttgtggaattactcttgttcctacctggttcagcacagcctcctcaatctcctcctcttgtattttctctttttgtttttttataataaaaagattcagtttttttgtgttgtcgctgatacctatttgcattttgtgttctgggtcaatgctgtcatgttctctgcaaattagggcttcaatccgtgctctggggtaattgattctggttcgtgtgttgataagtaatgtagctggagaagatgtgtgtattcgaataacaag

SEQ ID NO: 85120 - DNA, 305 bp, Glycine max
  Clone ID: 700954537H1
ctttttatttatcttcgttctctctctctccaacgatttcgccattcaacagcgatccttccgtcaccatcatcgtcatcaacgctcccattttcggaaccccagggccattgactattaaggatgtctcctgcatcccgatccaagtctaaagacaggaagcctagcaaggaagctcagaaggcttctgcaaagcctacaggatctggtaatgtagcagctggagttccagccagtgcatataaccccttattaggaacattccatactctggacatgtcaccaacacctagctcaccaataca

SEQ ID NO: 85121 - DNA, 310 bp, Glycine max
  Clone ID: 700954538H1
catttttcttctctctacttcttctgcgtcatcttagggttttggtttgtgctcttctcactgattttctggagatggcttctttcgggccaaatggaactgaaaatgaggattcgttgcctcccccacctcccgttgtaccatcagatgttgtacctgttaaagctgagccggagaagaaaaaggcttcaaggtttccaatagccaggcgtggccttgcttcaaaagggacgaagctgcaacttctcaccaatcactacagagtgaacgttgcaaacactgatgggcatttttatcagtatagtgtgct

SEQ ID NO: 85122 - DNA, 298 bp, Glycine max
  Clone ID: 700954539H1
ctttctcacttacactcacacaatctctctcttctatgtgtctatctctttccagcttggtaatattagtacaagtagagtagtagtagctcctggtggtgttgttgttgtgttgtgatctattagaaggttagatatttatgccacattttgatgtttatgcttagtacccaattgggtgaaaaaaattggtttatagctagctaggcatttgatgctcccgtcagagaaacccccctgcaaagggaaactctgctaaaataaattctgtctctttcagtcatcgcaggatttttga

SEQ ID NO: 85123 - DNA, 295 bp, Glycine max
  Clone ID: 700954540H1
ccaagcttctctgttaaaaaaaaattaggcgtctaaagggccaaagcttagaaagttgaagcttttttgttgaggtgaaagtgaaatggttggcaaggataatctgagggctgaggacttgaacttgtgctttaagaagcttatgatggtggccgggagtgggaacagtgagaaaggggtgaacttgaaggttggggtgatcaccgagtggaaggatattcctgtggagcttctgatgcaaattctgtcccttgtggatgatcagacggtgatcatagcttctggaggttgtcgt

SEQ ID NO: 85124 - DNA, 306 bp, Glycine max
  Clone ID: 700954541H1
gttttcttcttcttcttcccctccatgtcgttattgtatataattttatatgcataatcctttaggcttcatcatcaatcatatattgtctccttgagattcctggcttgttcaagagcaagccagaggtcattcattggatatcatttattttgaatgaaatattgagactactagactattttgagctatgttgtgttgtggaggtgcagaagaggattttggcattccacctggaaatcaatataatgcatcacctaaaaagggtaatgcatataatggtggaggaggaggtgacagagcgag

SEQ ID NO: 85125 - DNA, 310 bp, Glycine max
  Clone ID: 700954542H1
tctccatccaacatcgaaacgaggtcgttttgtgttccgccgaaggaccggaggttgtagcaggctagcagctatggatttggcatccaatctcggtggcaagattgacaaagccgaagttctctctgccgttcagaagtatgagaagtatcatgtttgctatggaggtcaagaggaagagaggaaagctaattataccgatatggttaataaatactacgatcttgttaccagcttttatgagtttggctggggggaatctttccattttgcacccagatggaaaggggaatctcttcgaagagcatca

SEQ ID NO: 85126 - DNA, 308 bp, Glycine max
  Clone ID: 700954543H1
ccagcttagccttcttcgggaatcgtctcttcgcgcttggcgaatccgacctcccttacgtcgttaacgtaacccctgacggcgacatcgaaaccctcggccgtcacgactttgacggaaaactcacgttcagcatgacggcgcaccctaagatagaccccgacacagcggagtgcttcgccttccgttacggccccgtgccaccgttcctcacctgacttccgtttcgacggtaacggcaaaaaacacgaggacgttcctattttctccatgctaacaccttcgttcctccacgatttcgcattacg

SEQ ID NO: 85127 - DNA, 312 bp, Glycine max
  Clone ID: 700954545H1
gcaaaatgcggagtgcgaaacctaactaaaacagaagaaatggcggagaagtcgggagcagcagaagagagctctaatccgatggcttttcaccatacgacgacgaagcttgtcgttttggcagaccttaacgtcgaagccgaagccgaagccgaagaagacgattcttctctcgtccctcctccactaattaccattttggcaaatgacgaaaacagtcaagataaaagttcgttgtccaaagacactgatagcattgaagctgaaagtaaaaagttgaacaaactgagcaaatcccgctcagaaagacag

SEQ ID NO: 85128 - DNA, 311 bp, Glycine max
  Clone ID: 700954546H1
gaaaagcaagtagctaaggaaaacaaaaacatcatcacagaaactcacaaaggaaaaacaaacaaacaaacaaaatgtcttctccaagcaagcggcgagaaatggacttgatgaaactgatgatgagtgactacaaggtggagatgattaatgatggaatgcaagagttttatgtgcacttccatggacccaatgagagtaaattctcctttgtttttatctttgttacatgttttgaagctttttgtgaattgttttttgtgaaaaaagttgggttgctattgtgggtatgtggtaattaacatatattg

SEQ ID NO: 85129 - DNA, 309 bp, Glycine max
  Clone ID: 700954547H1
gttgcgagttgagaccgggcctttgcattttcttgcgcagccatacagactctgcgccctgtgctgcgtgtgtgtgtgtgcgagagagagagacaacgaccccagacgcttgcagtctttctttggcggcggcgtcgttttctctacgctttacccattcattcattcattctcaggttcggggcatttcattctgattcactatggccaatggtccagcaccgttttctgagattgggaaaagggcaaaagaccttttatacaaggattacaacttcgatcacaagtttagcctctcaattcagactc

SEQ ID NO: 85130 - DNA, 271 bp, Glycine max
  Clone ID: 700954548H1
acaacccaaagatgttagatagaaagtggctttctactgctttgaatgttagaagccaaggattaggaagtgaaacaatagtctttgctcatggctatggaacagaccaatccatctgggacaagatcactccttcctttgctgaaaactaccgggttgtgctgtttgattggcctttttctggagctgtgaaggatccaagcctctatgaccctttgaagtatacctccttggaagcttttgcagatgagtttatcactcttatggatca

SEQ ID NO: 85131 - DNA, 322 bp, Glycine max
  unsure (1)..(322): unsure at all n locations
  Clone ID: 700954550H1
ccctccaccatgcaacactgcatgcagaatgcttccaagtatggataatagttgcccatgtatgtcggatattacgcagatcattaggaaagctctcattccatgctattgtttgtattttccttgcatcttctgtgtctccccaaatgaaagagcgacattgcacactaacacacaggttgtagcaatggcgagcgctcccactccacgcgaagagttcgtgtacatggcgaagctggcggagcaggccgagcgctacgaggagatggtggagttcatggagaaggtctccgcctccgccgagagcgangagtgaccgtgg

SEQ ID NO: 85132 - DNA, 305 bp, Glycine max
  Clone ID: 700954551H1
gagagagagagatggtgatgcattcacgggtcagaagcgtcgccggaaacatcaaatgcgcagcgagactcttctgttcatcttcgacgaccacgccgccggctgcgccgttgcagttcccgcagactctggcggggctccgggcgcggctggcggaggagtcgccgtcgctgtcggacttcctcgcgttaaaatcggagagcgcgtactcggtggaggtcgggactaagaagaagccgcttccgaagccgaagtggatgaaggaggccgttcccggcggcgagaagtacgtgcagatcaagaag

SEQ ID NO: 85133 - DNA, 302 bp, Glycine max
  Clone ID: 700954552H1
ccttcccaatatagtatattctcttctctggcgtccaagctagtcgttctctctgtctcgtttatagtgttttggtatattatattgttctggttgcacgaagcacactatgggttggaaatgaggtctcaaaaacgttgtcacaatgtttactttcatggtggccttggttgttgttcaacatgtgaagtgtggggactcaggtcgcatgttagttcagcacggtggcttcgttcaacgaagtgacaccaacttcgttctgagtaacatgcatttctacttcaacggattcaacgcgtact

SEQ ID NO: 85134 - DNA, 242 bp, Glycine max
  Clone ID: 700954553H1
ggcttatcacatcacaatttgtgcattgcctcgtgtcctttttcttctctgcttgccagaaatcttacacacacaggtatctagcaaatgggttctcaccagcaagaaccatggctattggagaatgggaaaccgagggtgttgaccaaggagaataggcatggccgttctgcacacagcatgtcctccacgtctttgcgcaagaagtctagccgatctcttgtgctccaagcttccatgtg

SEQ ID NO: 85135 - DNA, 295 bp, Glycine max
  Clone ID: 700954554H1
ctttcctttcctgctgcgttcattccaaattccaaacccaccataatatctagcttcttgtgaaggctgttagtttgatttagaagttgatattgataatttgctgtgatgggtggccaaaggagtggttatggtaagcgtccccactctcaatctgaccatgataatgggccaaataaaaggaggaatcatggtgatgacagagagcagtttgtgattgatttggaggatactgtgtatcgttacgtgtgcccgggtcgaaagattggcagtgttattggtaggggaggtgaga

SEQ ID NO: 85136 - DNA, 312 bp, Glycine max
  Clone ID: 700954555H1
aaaaaagagtggctctatgttaaggaaagcaacctatggagtttatctggcgatgcaaactctataatgcctatgctgagactgagttacttgaacttaccgataaaacacctaaggtacttgagatcttctgaaggtagctttgaaactcttccagaatcgctatgtgcattgtggaatttgcaaatattgaactttcagcttttttagatgtctaaaaaatttgccttacagtttgatgcgcttaaaagctcttcaggagctatctttgattgagtgctcaacactatcaagcttggctcccagataggg

SEQ ID NO: 85137 - DNA, 282 bp, Glycine max
  Clone ID: 700954556H1
aaacagtctctgcacactacactgaactccattcacaaaggaaaaaaaaaaagcagaagcataaagaagaagaagaagaagaagaagaagaagaagaagaaagaaatggcgcattctcggcaacagaacaaggctggcttcacgctctccagcaagatcaacaacaatgggagcttctctacgggtactggtagtaagagcatatacgacgacgtttacggaggcccactgaagttcggggtttggggcctctcccctcgtttcgaagactacggggggatt

SEQ ID NO: 85138 - DNA, 306 bp, Glycine max
  Clone ID: 700954557H1
aattacatagcctcagtaatctgagagagaaacaaaaacaatgaaggtttccattgccaagttccactcccttcccctatgttttttccttctcttggccttcaacacaaaacccctcctagcagcagaaccagagccagtggttgataagcaagggaaccctttggagccaggagtagggtactacgtgtggccactttgggctgatgaaggaggcctcacactaggccaaacaaggaacaagacatgccctctttatgttatccgtgacccttcattcattggcaccccagtttcatcttagca

SEQ ID NO: 85139 - DNA, 294 bp, Glycine max
  Clone ID: 700954558H1
cttagaacgttatcccattctatttccaatatagctacgtttgtactaaaacatcaacggggtttctgtagaaatcctatcgtactcttgtgcattgtattagaatatatgcagttcatttgcctcaataatcttctcagcattgccgttgtaaattgatttgtatgtattattccaagaatagaactaattctctatttttggtttaaataatatttgtatttcctttcaaaaaaaaaaaaaaaaaaaaaaaaaaaaacaaaaaaaaaaaaaaaaaaaagagggggcccccca

SEQ ID NO: 85140 - DNA, 310 bp, Glycine max
  Clone ID: 700954561H1
ggaaatcttgtcatgggttccggtgaaggatctcctgcggttcaggtgcgtcgccaagtggctgcgagccctcatctccgatcctacattcgtcaaactgcatcttctccacatgtcctccagaaacgcacacatcctactaacgttttacgacaaacactaccctggagacaagtattccgcaccccgcaggtactgcgccccctgctctgtgcacgctttactccacaacccatcttccaccatcgagggtttccgccccttcgacataaacgtttacagagtcttgggtgtctgcaaggcttggttt

SEQ ID NO: 85141 - DNA, 311 bp, Glycine max
  Clone ID: 700954562H1
ctgtgaggcttcaatttccaattagggtttcgcttagagtaaccaattaccatgggagtcttcacctttgtcgttcgcaaatccggcgccgaatggagcgccaagcaacattccggcgacatcgaggcctccgccgactccacctacgatctccaaaggaagctcgtgcaagccgctctcgccgttgattcctccggtggagtccagtcctccttctctcccgtgtctcctacctccgctgtgttccaggtgatagtgggtggtgctgtattcgttggaggtggcggtggtgctgttgcagtgcacctgca

SEQ ID NO: 85142 - DNA, 308 bp, Glycine max
  Clone ID: 700954563H1
attagaaaacaaagcctttccgtttcatctcgaattgtgaattgaatattcaatgactaaaaaaatggaataaaaaaacgaagaattcaaagaatgattccaaattgaaggtaggataagaacaaaggttctacatattcacaaaaaaaaactatgtatgtaggtagagacgaaaaaataaatctcgaagtaattcgtagagttcaataactattattattttcaattcggaattcttattaattactttaaaccgaataaatcttgataattgaaaaattgagtcataatttaatggttggttatac

SEQ ID NO: 85143 - DNA, 168 bp, Glycine max
  Clone ID: 700954566H1
actccctctacctgagaaggaggatccctgtgctagctcgatcaaagatcaaagatggaggagcggactcgcagcattctgattttgatgaccttgctttccatctccattgctggcggcaatgcaggtggcttgcagcatcataagggtaggcatggtcagcatggt

SEQ ID NO: 85144 - DNA, 315 bp, Glycine max
  Clone ID: 700954567H1
ataatctttccctctttgtgttgaattcctatctgaaggattgatttggggattggacctcatggatcgcctaaaatcttctccgcagctcatgattgtttcggatcttgatcacacaatggttgatcatcatgattctgagaattggtccctttttaggttcaatgccctttgggaagcccattatcgccaagattctctgctggtgttctcaactggaaggtcacctacactctacaaacaactgaggaaggaaaagcctctgataactcctgatatagccattatgtctgtggggactgagattcttatggg

SEQ ID NO: 85145 - DNA, 316 bp, Glycine max
  Clone ID: 700954568H1
cttcattctaatgttgctgaggcaattgaggatcatggggttgctgcatacccattcacccctgaaaagtttgctgagcttgatgaaatactgaaggccaaagaggcagctcaaacccttgagtcaattttggtgtctgacgatcaagattttgtcattgggaaagatggggtgaagattccagtgtcagaattgaaggggaaggttgtcctcctctacttctcaggtcactggtgtcctccatgccgtgcattccttccaaaacttattgatgcatatgataagattaaggaatagggcaatgcatagaagttgt

SEQ ID NO: 85146 - DNA, 309 bp, Glycine max
  Clone ID: 700954569H1
acagcacagaatggggcgcaaagagaagcagaacgcgaaggcaatagatgaggaacacgacgtagtaaattttaacggcgcttcaacgccgtccctcgttttcagcagcgacgacgatgaagccaaccaagatctcagcctcaagatcgtcgaaaaggccatgcgaatgcgcgccgccaaacacgccccaaacgacgacgtttcttctccgttttcgcagaaatccgaactcgcagtgcccctaaacgacgtcgtttcggatttgcgcagcgcaatcgctgattccgaagtgacggataagaagaaacg

SEQ ID NO: 85147 - DNA, 264 bp, Glycine max
  Clone ID: 700954570H1
atgaaaatgcttgatttggcgtttcaatgtgcagcccccattcgaacagatagacctgacatgaaatcagtgggcgagcaattgtgggcaataagggcagattacctcaagagtgcaaggagataataagttgtggtattttgtgatgatattgtgaggtggcaaccaattgaagctgtctcagaatacaagacctgaataaaagtaacaaacttagacaaaaaaaaaaatggtacaccgaggagcttccttatcttgccactg

SEQ ID NO: 85148 - DNA, 311 bp, Glycine max
  Clone ID: 700954572H1
gaaaagaaagccaaaactacagttctttcaatgaagctcccagctttttcttcttctcctcctccagtacattattgttttctgccttcaacgacttttaagtcacttgtccgtttgacagtactattactagttgtttccagcaacagaacaaagggtgctgtggaacttccaccaaatgtctcggttccagcagtgttggtatttggagattcgatcatggacactggcaacaacaacaacaacttgataacatcagctcggtgcaacttctcaccatatggccaagattttatgggaggatcctactg

SEQ ID NO: 85149 - DNA, 307 bp, Glycine max
  Clone ID: 700954573H1
ctcttattagcgacggccattctcgccgttgtgtgctccgccgtgagcggttgctcgccatcggatggggcggcgctgctggcgttccggaaggcgctgagcgagccctaccttggcctcttcaactcgtggacgggctccaactgctgcctcgactggtacggcatcagctgcgacgccaccaccggccgcgtcaccgacatcaacctccgcggggagtccgaagaccccatcttcgagaaagccggtcgctccggctacatgaccggaaaactctcagaggcgatctgcggcatcgcaccctcac

SEQ ID NO: 85150 - DNA, 308 bp, Glycine max
  Clone ID: 700954574H1
gtggagtgtgcagaagagcgtcgcagtcgcaaccctaatcagaagaagcgcagttgcaagcgagtgacagccaccagccatgggtcgtatgcacagccgcggtaagggtatatcctcttctgctttgccctacaaaaggacacctcctagctggctcaagatctcttcgcaagatgtcgaagaaaatatctgcaagtttgcgaagaaaggtttgaccccgtctcagattggtgtcattctcagagattctcacggtattgctcaggtcaatagcgtcactggcagcaaaatccttcgctcctcaaagc

SEQ ID NO: 85151 - DNA, 271 bp, Glycine max
  Clone ID: 700954575H1
attagattatctcccactgctgcatcacctatatatcttataaggtgtatgggaccatagtagtgagggctgtgtctttctctttttttcctacttgtcatttatatttatgagcgagagaaatagtgcgtgtatctggttgctaattcgagtgctattagtctgtggtttcgttggtttgtaacccctctgctttggttatgctggattgtatattatccttaaagaaatgaaagattaaattatcaaaaaaaaaaaaaaaaagggcggc

SEQ ID NO: 85152 - DNA, 186 bp, Glycine max
  Clone ID: 700954576H1
ctcattaattgcaagaatggcacttcgttgcttggtgatgtccctttctgttctcttcactcttggtcttgcgagagaaagccatgccagagacgaagatttttggcatgctgtttggccaaacactcccattccaagttcattgcgagatcttctagagcctggccctgcaagtgttgaaatcga

SEQ ID NO: 85153 - DNA, 310 bp, Glycine max
  Clone ID: 700954578H1
gcaagacctacttggaagtgaaggggacaggaacagcaaaccagtgtccaacaattgatggtggattggagtcatttgccttcaagcaagggaaatacaatgccaagaagttctgccttgagccaacttcattcacagtgaaggcagagggtgtggccaagaacgctccccctgagttccaaaacacaaagctcatgacacgtttgacctacactcttgatgagattgagggaccctttgaggtgtcttctgatggcactgtgaagtttgaggagaaagatggaattgactatgcggccgcacagtccag

SEQ ID NO: 85154 - DNA, 217 bp, Glycine max
  Clone ID: 700954579H1
aattaatcatcttacttatttattctccgaaaatggttgatttacattggaaatcaaagatgccaagttccgacatgccttccaaaactctaaaactctctctctccgacaacaagtccttaccctctttgcaactacccttccgcaccacagatatctctcacgccgcaccttctgtttgctccacttacgactactatctccggcttcctcaact

SEQ ID NO: 85155 - DNA, 139 bp, Glycine max
  Clone ID: 700954580H1
acaacccaaagatgttagagaaaaagtggctttctactgctttgaatgttagaagccaaggattaggaagtgaaacaatagtctttgctcatggctatggaacagaccagtccatctgggacaagatcactccttcctt

SEQ ID NO: 85156 - DNA, 310 bp, Glycine max
  Clone ID: 700954581H1
ctctttttcttagacaggctctgctcctccgcgtttgcttccacaactaccaacgcttcaccgccggaggtacgccgcacgtcaccggctgtggtgcagcgcagcgccaacctaccgtcagacgaagcggagaagaaaacaaactccggcggcatcagcaacagctcctttgcacggaaagctcagtatcctccgtcaagtgaagcgcggtgggaggacgaccccgattaccgcaaatggaaggacaaataaaaggagattctcagcgacattgaacctatcgttgttctcgccaagggatatctccact

SEQ ID NO: 85157 - DNA, 286 bp, Glycine max
  Clone ID: 700954582H1
cacccttctttgactgttctcccacaccacacccatgaacctcctcctgctccttattctcctctttcacgcggcggaagcaagggacagtggcagctcctccacaaaaacatcggcattgtcgccatgcacatgcagcttctccacaacgaccgcgtgcatcatcttcgaccgcaccgacttcggactctccaacctaaccctccccgacggaagatgccgcaaaaaccaaacgagttggtcgtcaaacgccgatgcaccgggcactccatcgaatacgacgtcg

SEQ ID NO: 85158 - DNA, 287 bp, Glycine max
  Clone ID: 700954583H1
atctcatcaccaccaccaccacgcaataaagttacatcaaaccacaacaactttttcacatcttacacaacactgtctctctctcttctctttctctgcgtttctctgaaaaaccagaacaagctctggagaaaccgccacaaaaaaaagaaaagaaaacgcaaacctaaccgcaaacggtaaccccattatgccatgcttcacaccacacccctctcttctcttccttcttctcacccttctctctatttccttcttctctccttccaccgctgcaagaacctctt

SEQ ID NO: 85159 - DNA, 313 bp, Glycine max
  Clone ID: 700954584H1
tgataaacttcaccatgacagtccttggacatgccctaagtacagagtgacctttgatgcatcagttatatggggtctgattggaccaaagaggctatttggacctggtgggctgtacaggaaccttgtgtggttattcctgattggagcagtgctgccagttcccatttgggtgttgagcaaaatcttccctgagaagaaatggataccactgatcaacataccagttataacctacggctttgctggaatgccaccagcaactccagccaatattgcaagctggctagtgactggaatgacttcaattact

SEQ ID NO: 85160 - DNA, 303 bp, Glycine max
  Clone ID: 700954585H1
gcgatttcgcatcaacaatggaggagctattcgtggcagttctatcgatgcttctcgtagcagcgttgatcgcactctacctatggaaacgccgccaggattcgaaacctccccctccccaccgcgacgaagctcctcaggctccgcggagagaaacggtggcccgcgccaccgccactcgtcgcatgcgtcgccgacctaccgcgtctggagctagtacttcggcagatccacctgcgacgcaagaagaatctgctggtgagagtgacgatgaagctgctggtaggagggtattatgaggct

SEQ ID NO: 85161 - DNA, 303 bp, Glycine max
  Clone ID: 700954586H1
agtttctgaggagagcagctttcttgaagcacaatctttgggtcactccttatgttcccggcgaaatgcatcccggaggggagtttcctaatcagaatccacgcgttggagagggtttggctacttgggttcagaagaatagatcattggaagaagccgatatagttctttggtacgtgtttggtataacacacattccccgattggaagactggccagttatgccagtggaacgcattggctttatgcttatggtattccactcaaagttagcgtatttcattgccattctttctgtgcaaa

SEQ ID NO: 85162 - DNA, 310 bp, Glycine max
  Clone ID: 700954587H1
ctagtctcaagcttaactctcatattcttcaggagtctactgctaaagagattaatgaaaatcccgaggcaggatgggaggctgctataaatcctcgtttctccaattatacagttgaacaatttaagcgccttcttggagtcaaaccaatgcctaagaaggaacttagaagtacacctgctatatctcacccaaagacgttgaaattgccaaagaattttgatgcgaggacagcttggtcgcagtgtagcactattggaagaattctagatcagggtcactgtggttcttgttgggcattggtgctgtt

SEQ ID NO: 85163 - DNA, 311 bp, Glycine max
  Clone ID: 700954588H1
agaatggaacaaattccattgtttaatgagaaaatgaaattggctcagaaagcagccatggctaaacgatgggaagacttcaagaaaataatgaaggacgaccaggagaacttgctcaagcagtttgatctgtttgagaacagtgccatccatgttgcaactcgctctaacagcccacgactcctcagagaattgatagagatgttaccaaaagaagaaaggtggcaagctttgtgcaaggaaaatcgcgaagggaacacggttttacacgaggttgtgttttgtaagaagaagaaaatggctgatgttgt

SEQ ID NO: 85164 - DNA, 304 bp, Glycine max
  Clone ID: 700954589H1
cttagctcaaacctcacctcaataatctttcgtgctagctagcttaatcatattccaattccaacagaaccaaattctgctagctagctagtacgtcaaaggaaataaaataatatggcattcagcgggacccaacagaaatgcaaggcttgcgacaaaactgttcacttggtcgaaggtttatctgtcgatggggctgcttatcacaagaattgcttcagatgcagccattgcaatggccttcttgcgataagcaactactcatccaccgaagggttttgtactgcaaggtgcacttgagcag

SEQ ID NO: 85165 - DNA, 304 bp, Glycine max
  Clone ID: 700954590H1
ggaaatcttccgcactgatggtgaacaagtcctcaagtttccaccacctcatgtcatcaaagttagtaagtctgcatggatgactgatgaagaatttggaagagagatgcttgctggtgttaatccatgcctaattgagtgccttcaagtgttccctccaaagagcaagctagatcccacagtgtatggtgatcaaactagtacaataaccaaagaacacttagagatcaaccttggtggactctctgtggaacaggcactgagtggtaacagattgttcatattagatcaccatgatgcattc

SEQ ID NO: 85166 - DNA, 304 bp, Glycine max
  Clone ID: 700954593H1
gtgccattctactgttgtttctgggtggttctcagcttctcaaacttgctctgggaaatctgggaaagctgtttatttcaacaacccaatgtggccaggagaagcccattcaatcaaagtagaaaagatcttatacaaggaaaagtcggagtaccaagaggtcttggtttttgagtcatcaatgtatgggaatgtgcttgtacttgatggaatagttcaattgactgagagggatgaatgtgcttaccaggagatgatagctcatcttcccctctgttcaattcattcgcccaaaaagttttag

SEQ ID NO: 85167 - DNA, 308 bp, Glycine max
  Clone ID: 700954595H1
atcagatatgttttctgagttcgagatttttgcagtggtgacacattcggggacactcgagtctggccattatgtttctttagtgcgtgtaaggaatcaatggtacagatgcaatgatgcttggataactgtggttgatgaggctacagtcagagcttcacagtgttacatgattttttatgtgcaaaaaactctgcacaataaagcaaatgaagacctgagtcacgtgccaaattcccctggaagagacctatttcttcctattgctggatgttgctagaaaagaggattatattgtaaaggagtac

SEQ ID NO: 85168 - DNA, 286 bp, Glycine max
  Clone ID: 700954596H1
ccaaaaaggccttgctagtggtgtcacaggtatggctggtcttggcagaactaaagtttctcttccttctcaatttgcctcagctttcagctttcatagaaaatttgccatttgcttgagttcttctactatgacaaatggtgtaatgttctttggtgatggcccttacaattttggttatttgaactcggatctctccaaggttctaactttcacccctctcatttcaaaccctgttagcactgctccaagttatttccaaggggaggcctcagtggaatacttt

SEQ ID NO: 85169 - DNA, 255 bp, Glycine max
  Clone ID: 700954601H1
gttatggacactagtgtctctccctctctcctactttctctcctcttctttgcaagagtcttagggcttgcagtggcagtgcttgtcctcatatgggcccttgccttcaaatccagcttcctcactacctcactctcccaacaagacctcatctatgcagttcttcatcctctgctcatggtcattggctttatcctcttaagtggagaagctattttggtgcatagatggttacctggatcaagggggttaaag

SEQ ID NO: 85170 - DNA, 226 bp, Glycine max
  Clone ID: 700954602H1
gttgaaggctaaaataaattaaacaaaaataggaggaacaaacaaagccatggaagcttgtgctggccatttatataggtgttgatgtgtgttctcaaattttaggtcaacttgaaaatttcttgcataaattttttttatagtggcttgttatatattgattttctgataaagcgccaaatggctatagagaaatgaaaatgaaggtgaaatgaagttgtgcatg

SEQ ID NO: 85171 - DNA, 204 bp, Glycine max
  Clone ID: 700954606H1
cttctcttaaaagagcctttgctttttctttaggcctttccgaattaagtacttgtttcattttctctcgaagcaagaaaaatgttcatcgagagtttcaaggttgagagtcctaacgtgaagtacacagagactgagattcagtccgtgtacaactatgaaaccactgaacttgttcacgagaacaagaatggcacttatcag

SEQ ID NO: 85172 - DNA, 255 bp, Glycine max
  Clone ID: 700954607H1
ggatcccacgagacattggttgtagccgtcaaccggcgaagtattctggcaaggtgtatttgaaagagagagaagcttaaggcacaaggagaaggaaaagaggaagcagaagagtatagaaaaacaaaacagaataaggaagcgtcatcgccaacaagtgatagggaaatatattaagcccccaccagacgaagaaagctctaattcatctattgcagtaacagcatcatgatgattttaaaaccattgttttga

SEQ ID NO: 85173 - DNA, 251 bp, Glycine max
  Clone ID: 700954608H1
atcattgttggctattcattcattcgtgttcctcaggagagagagggtgcgtgtgattcggattcgaattcgaattagggttttgcgcatcgtcatcgaatttttctcttatgcaaggaaggttttccttctccgatttgaatttgattgaacgagtagtgttaagattatgatattttttgagaagcttcgtttctctcctcacttgagccgcttcattgccggcatcctcctgttaatcttctgcaatt

SEQ ID NO: 85174 - DNA, 79 bp, Glycine max
  Clone ID: 700954611H1
attacagaccccccttaattgatggtgctctgtatcccctttttcttctgcaagaactacaccaactaaaacctccttc

SEQ ID NO: 85175 - DNA, 249 bp, Glycine max
  Clone ID: 700954612H1
gcagtgggaggaggctcgggactctgaccgcgtgcctgttgaagaatgagccggcgactcataggcagtggcttggttaagggaaaccaccggagccgtagcgaaagcgagtcttcacagggcaattgtcactgcttatggacccgaacctgggtgatctatccatgaccaggatgaagcttgggtgaaactaagtggaggtccgaaccgactgatgttgaagaatcagcggatgagttgtggttaggg

SEQ ID NO: 85176 - DNA, 249 bp, Glycine max
  Clone ID: 700954613H1
tggagttgtttctctgatcctcctcttgtacttgtttttgcgtggtggttcatggaagagtggggaagagggtcctccaacagttgcaggtgcatggccaataattggtcacctcccattgttgcttggttcaaagacacctcataaaacattgggtgacttggctgacaagtatggacccatattctcgatcaagattggtgccaaaaacgcagtggttgttagcaactgggaaatggctaaagaatg

SEQ ID NO: 85177 - DNA, 244 bp, Glycine max
  Clone ID: 700954024H1
cagggcccaactccatcttctgaagatgaagtttctgagatcagaaagctgtttgaaaatgaatgcaataggagaaaggcagcggaagcagaggtagaacatctaaaaattctactggggaaaaatacacacacacaggctggaggggatgcagaggttataaaggttcacagcattctggaggatgaggttaatcagaaaaagaaacttgaagaagaaataataatattaagaagtcaattat

SEQ ID NO: 85178 - DNA, 256 bp, Glycine max
  Clone ID: 700954025H1
caaattgaaccttaccttttttttattcagaatctcaattcaattttcatggtggaccaatttgctgaattgggctaacacctttgattgatcgttgtgggggtcttttggtcaatattttggaactgtgaagatttttgttttagactgtgctggttttgtttggtaattttatgcactagggtgcttctgtgttactacaaggaaatgctttcctattggattgcagtgttttagttaacaatggctatcactg

SEQ ID NO: 85179 - DNA, 255 bp, Glycine max
  Clone ID: 700954026H1
attggattgttcctccgaacagtgaaccctcacctaacaatcagaacccaggatttggtgaaacgatgaacagtgataggaaaattggggttgccttggacttttccaaaggaagcaaaatcgctctgaaatgggctattgacaatcttatcagcaacggtgacactctctacatcgtccacaccaagccttccggaggaagtgaatcaggaaatcttctctggtccaccactggttcacctctgattccattgt

SEQ ID NO: 85180 - DNA, 251 bp, Glycine max
  Clone ID: 700954027H1
ccaacctctaacctacctcattggctactctctcaacaacttcaccttcttcctcctcgatcatgtctcacttcaagggcaagtaccatgatgagcttatcgccaatgctgcgtacattggcactcctggaaagggtattcttgctgctgatgagtcaccagggacaattggcaagcgtttggccagcatcagtgtagagaacattgaatccaacaggcgagctcttagggagctgctattcactgctcct

SEQ ID NO: 85181 - DNA, 250 bp, Glycine max
  Clone ID: 700954028H1
cccaatcgtagccgtcgcactttgcgttttctacgtcatctccgattccccgacaatggccatccaaatgagcaagaagagaaagttcgtagctgatggagtgttcttcgctgaactgaacgaagttctgacacgggagttagccgacgacggatactccggcgtggaagttagggttacgccgatgcgcaccgaaatcatcatcagagcgagcaggcccctatccagtctccaaccccattgacgcgtg

SEQ ID NO: 85182 - DNA, 252 bp, Glycine max
  Clone ID: 700954029H1
aatcgatcaattttcaattttcaattgtgcccatcttcgttgctgccaccatgcataggatcaacaccgcaaggtccattttttctgctgttttcagaagcaaatctcggcctcactctgctgctttctccacctccttgctcttcgacgaaactcagacacagtttaaggaaagtgttgctcaatttgcaacggaaaatattgcccctcatgcttcgaaaatagaccaaacaaattatttcccaaaggagg

SEQ ID NO: 85183 - DNA, 253 bp, Glycine max
  Clone ID: 700954030H1
ccataatagcagcaacaatggtgaagcactacagacccccggggcagaaaaaggagggaaatgctgccaaatttgtcattaggtcacaagcaatcaagcagcttcaaatcagtctaccccttttcaggaaactatgtattttgaaaggtgtcactccaagggagcctaagatacagttcaagggaactcatcagacttattaccatgtcaaggatgtttccttccttcatcacgagtctttggttgaaataca

SEQ ID NO: 85184 - DNA, 257 bp, Glycine max
  Clone ID: 700954032H1
gatcgtgttcctgaaactatgacaaccatgtcaacctcatcctcttcccaaagcctcaaaattggcattgttggattcggcaactttggccagtttctggccaagacaatgattaaacaaggccacactctcacagcaacttctcgatctgattactctcaactttgtctccaaatggggatccattttttcagggatgtcagcgcattcctcgccgcagacatagatgttatagtgttgtgcacatcgatattatc

SEQ ID NO: 85185 - DNA, 271 bp, Glycine max
  Clone ID: 700954033H1
atcttgtgttgtgtccctcttttaagctatttccttctcttaacacaattggttgtgccaattgccatagtcaccaaccaattaacaaaggtatatatatcatcatatcatcaccaaatgaaaaatattgggttgttttttcttgtggtggtggctacttttgtggcggcagccacagctggtagcttttaccaagactttgaaataacgtggggtggtgagcgtgccaaaatctatgagaatggaaaccttctcacactctcccttgaca

SEQ ID NO: 85186 - DNA, 265 bp, Glycine max
  Clone ID: 700954034H1
cgagataactagaaacagtgtgatgaaaatgaaggtccttgttttcttcgttgctacaattttggtagcatggcaatgccatgcgtacgatatgttccctctccgaatgaacactggctatggtgcccgtactccggaggtgaaatgcgcaagttggaggcttgctgtggaagcagacaacatctttggctttgagaccattcctgaagagtgcgttgaagcaacaaaggaatacatccatggcgaacaatatagatcagactcc

SEQ ID NO: 85187 - DNA, 263 bp, Glycine max
  Clone ID: 700954035H1
caaacctcagacagaaggtgcagcttttcgtactcgctggctttttggcggaactaattacaggagaatgtttgaacccctagatattgctgagtactacgcgaatggtggtaaagactatgaggctaagggaagatctagacattatatagtgttgcaggagtggctggaagaggataagaaagagaaaagcaattcaaacagtacaaacaaaaaggatgtggaatctattttaacttttgactcttgcttttgggcacatg

SEQ ID NO: 85188 - DNA, 258 bp, Glycine max
  Clone ID: 700954036H1
gagcgagcggactcggcatgactcggcattggcgctttaccatttgtctttggtccagagtaaccgatccaagatggttaaactcggttcggttccggttctattgaatatggttaagtcgggtcacatgacgggtcgggttttgttgattttggggaacttgggttccgggtcggacgggagggccacgatgcttgatgcgggcatggtggagtgtttggtggggttgctcagtggggccgagtcaaggagcgggtc

SEQ ID NO: 85189 - DNA, 258 bp, Glycine max
  Clone ID: 700954037H1
gatgtataggcaccgtagggaaactcatgaacatcgcaacgcgttaggtagcttcctctccactattcaaaatcggttccattccaatataagaagtgaaagagcccagaactaccaggcaagaacatagtgtatgtgtttcaaaactgtgattttgttatctgttcttcaaaaccattgaagatgaggtggctctttcctctcctctttcttttttcgcttggtcttactgttactggtcaagaatccattgagttc

SEQ ID NO: 85190 - DNA, 257 bp, Glycine max
  Clone ID: 700954038H1
agggatttccatggaagtctcaaaagaagaagctcgagtggcacccgcaccggccctagtggcgttgctgccatcccctggcatgggccacctaatcccaatgatcgagttcgcaaagcgagtggtgtgctaccataacctggcggtgagtttcgtgatccccactgacggcccaccttcaaaagcccaaaaggcagttctggaggcccttccggactcaatttcccacaccttcctccctccggtcaactctccga

SEQ ID NO: 85191 - DNA, 160 bp, Glycine max
  Clone ID: 700954039H1
atgaaattgagagagttgccaaggctaatcgttaagccaacccaacaaccagtattgtggccagaaagatttcgacctttgtacttcatttatttaaattttgaatattgtgtattacttttgatgaatttagttaatttttagttcgcgtaaggatttt

SEQ ID NO: 85192 - DNA, 257 bp, Glycine max
  Clone ID: 700954040H1
ctcgagccgaatcggctcgagaaggagaagcgctttgctgatcccgaacagcaggaagttacgtgtaacggggagctgcttcgaggatcagacgcttattgatggtatctgcagtaaatataacgatgcagtgattcatctttttgttagggtgaaatatgcagaagttaggacgggacaagatgagttgtccgttgtggcaaaggagttgaaagatacaaaagattatgatgttagtgaaactaattgtaggaaaa

SEQ ID NO: 85193 - DNA, 258 bp, Glycine max
  Clone ID: 700954041H1
ctcacagaattctcgccttttccgaatatggcatcgcgcgtcagcacttggcaatctcacttcctccgcgccgtatattaattcccctcattttcgctcacaacttaagctttccagcaactcctctttgcacaagccactcatgcgcgacaagactgtgctggtaaccggcggaccgttacatcggcacccacaccgttcttcagctcttgctcggaggttgcagaaccgtcgtcgtcgacaatctcgacaattcct

SEQ ID NO: 85194 - DNA, 251 bp, Glycine max
  Clone ID: 700954042H1
caggactggtagaaaatggtgtaacaaaagttccacttatgttctattgtgaaaactctaatctcaatgatggcataaccagtgcatcaaattcaaagatcagcatccccataattgacctcacagtcatccatgatgatcctattttgagagatcatgttgtgggaaaagttagatatgcatgtgagaagtggggcttctttcaggttataaatcatggaattccaactcatgttttggatgagatgatc

SEQ ID NO: 85195 - DNA, 250 bp, Glycine max
  Clone ID: 700954043H1
cgctctttcagctttgactttggtggaaactaaagactagtcaaaatggtgaagttcacagctgaagagctgcgtcgcattatggactataagcataatatccgtaatatgtctgtcattgctcatgttgatcacggaaaatcaaccctgactgattctcttgtggctgctgctggtattattgctcaagaagttgcaggtgatgtccgtatgactgatacccgtgcagatgaagctgagcgtggtatta

SEQ ID NO: 85196 - DNA, 251 bp, Glycine max
  Clone ID: 700954044H1
ctctcttctcttcattctccctcttaattcttttctcttttctttctttcacacaaactcctcttattatgatgggtcttgatcaagatgctagcagcaactctggccttcatcttattctagggttagctttgactgccaccaccaccactactccatcactaccatccatttccaacaagcttgatcatgttgatcatcatcaccatcttataactcttagaccaacaacaaagtcaccctataattcc

SEQ ID NO: 85197 - DNA, 251 bp, Glycine max
  Clone ID: 700954045H1
aaatgaacgacgcagatgtctcaaagcaaatccagcagatggtgcagttcatccgccaggaagctgaggaaaaggccaacgagatctctgtctccgccgaagaggaattcaatatcgagaagctgcagttggtcgaagccgacaagaagaagatcaggcaagaatacgaacgcaaagagcgccaagttgaaattcgcaagaagattgagtactcgatgcagctaaatgcttctcggattaaagttcttcaa

SEQ ID NO: 85198 - DNA, 250 bp, Glycine max
  Clone ID: 700954046H1
caagcccaacaaacttggttttaattggtataggcgtgccaaggtcttgttaattttgagcgttaagtgctgcaactaatcagatcccaagaccttggcctaccttgccatacagaaaaaaaaaaagcaaaaaaaaagccaaggtttggagccaacaaaaataaacacaaagcacaagtcatggaaagaataatggttggaagtgcaacaaaggttgctttcaccctcttggccactttcgccattgtca

SEQ ID NO: 85199 - DNA, 251 bp, Glycine max
  Clone ID: 700954047H1
ctcgcaaatttcccctcactttccgggaaaaaaacagaactccaatcacacctcacaagctccctttttcagcaaggcctaccaccaccagagtggtgttggtgaagtctcaggccacagcacctgcttcttctgaggctgtggcagtgaccacctgtgtcttctgagatgaaggcatgggtctatggggaatatgggggtgtggatgttctgaagctggactccaatgttactgtgcctgatgtgaagga

SEQ ID NO: 85200 - DNA, 267 bp, Glycine max
  Clone ID: 700954049H1
tctaaatgcagaattacctgcatgccttcctgtgcttgttgatcggatgggaaatgagataacccgacttactgctgtcaaggcattcgctgtcattgctgcttctccacttcgggtggatctatcatgtgttctagagcatgtggtagcagagttgactgcatttcttagaaaagctaatcgtgctctaaggcaggctaccttgggaaccttaaattcacttatagttgcttatggcgataagattatgttgtctgcttatgaagt

SEQ ID NO: 85201 - DNA, 266 bp, Glycine max
  Clone ID: 700954050H1
tgctcgagccgaatcggctcgagctcattaattgcaagaatggcaccccgttgcttggtgatgtccctttctgttctcttcactcttggtcttgcgagagaaagccatgccagagacgaagatttttggcatgctgtttggccaaacactcccattccaagttcattgcgagatcttctaaagtctggccctgcaagtgttgaaatcgatgatcaccctatgcaaattgacgacacagtacccgagaaccttcttctataaagaag

SEQ ID NO: 85202 - DNA, 259 bp, Glycine max
  Clone ID: 700954051H1
gctaaaatgcaaggaggatttcaatcatttttgtcacacgggaatgtcattagaaatgctgttctacaacgggtgcgcatggtgaaccccctgttacagccaattgtctcttcgcggtttgaatctgttacacctgctcgcattgaggagcatggttttgagagcaccacaatttcagacatcttgaatgataaaggcaagggtgctgatggctcctggctttggtgcaccacagatgataccgtttatgatgctgtta

SEQ ID NO: 85203 - DNA, 261 bp, Glycine max
  Clone ID: 700954052H1
ctcttctttctcttcttcctcctcttcttagcctccgccgccgccagcgtccccgcccacaacatcacccgcatgcttgccaaacaccccggcttctccaccttcaaccactatctctccctcacccacctcgccgaagagatcaaccgccgccagaccatcaccgtcctggccctcgacaatgccgccatgtcctccctcctcgacaagcacctctccctccccaccatcaaaaacgtcctctccctccacgtcctcgtc

SEQ ID NO: 85204 - DNA, 258 bp, Glycine max
  Clone ID: 700954053H1
gcagacttaacaacagcacaaagcgggttactgtctgttcaagctaccatctctctctctctttcttagtgcctccttgccagaagttaaaatggcccaagaaactttcctattcacatctgaatcagtgaacgaggggcaccctgacaagctctgtgaccagatctccgatgctgtgctcgatgcatgcttggagcaggaccctgacagcaaggttgcttgtgaaacctgcaccaagaccaacatggtgatggtttt

SEQ ID NO: 85205 - DNA, 252 bp, Glycine max
  Clone ID: 700954054H1
tttcgttcgtcaccatgacttttaagcgcaggaatggaggtcgcaacaaacacggccgtggccacgtcaagttcattcgatgctccaactgcggcaaatgctgtcctaaggacaaggctatcaagaggtttctggtgaggaccattttgaaccgggttgcattcaaaaatgttcaggaggctttgtctatgaacaatacacgcttccgaagctttatgtgaagatgcatattgtgttcctgtgctatccact

SEQ ID NO: 85206 - DNA, 252 bp, Glycine max
  Clone ID: 700954055H1
cactcactcagtcgctcacgctctgtttcagatctgaagaagccacataaccctaagcttcaaacgggtaagtgtcgctgggacttcaatggcagtgaccgaagctcaaaatcctcttcttggagaaaacacatgtggttccttgttaaaaaagcttcaggaaatatgggatgaggttggtgagagcgatgagcaacgagacaagatgcttcttcagttaaaacagcagtccttggttttgtacaagagaag

SEQ ID NO: 85207 - DNA, 243 bp, Glycine max
  Clone ID: 700954056H1
attcaacaagaccccgaactccaagcttggtggaaagaacttgtccaagtgggtcatggtgagttgaaagataagccatggtggcaaaagatgcaaacttgtgaagagttgattgaagcctcggccaccctcatatggatcgcttcagcccttcatgcagctgttaactttggacagtatccatatggaggtttaatcttgaacaggccaaccattagcaggaatgctgcctgagaaagggtc

SEQ ID NO: 85208 - DNA, 255 bp, Glycine max
  Clone ID: 700954057H1
caaagataaagcattccatagcctcccataaaaatgaagaatactatcttctctgctctctttctactttgtgccttcaccacctcatacctaccttcaaccaccgcggtggtcgataccgacggtgatattcttcagaatcctggcacatactttatcttgtccgtttttcgacccggcggcggagtagaattcgccgccactggaaacgaaacttgccctctcactgtcgtgcagactctcttcgggaggggc

SEQ ID NO: 85209 - DNA, 252 bp, Glycine max
  Clone ID: 700954058H1
ctctgtctctctctctctctctcgatcaatcatggctttgcccaatcagcaaaccgtcgattaccctagtttcaaactcgtcatcgtcggtgacggtggtacaggaaagacaacgttcgtgaaaaggcatcttaccggtgaatttgagaagaaatacgaaccgaccattggagtggaggttcacccattggatttcttcacaaactgtggaaagattcgcttctactgttgggatactgccggacaagagaa

SEQ ID NO: 85210 - DNA, 80 bp, Glycine max
  Clone ID: 700954059H1
atcgcaatctctcaatcgagtgctacatcagacatacctcgcgaattggggaagctggttagacccaatcgcgagaggca

SEQ ID NO: 85211 - DNA, 247 bp, Glycine max
  Clone ID: 700954060H1
gccactttcgccattgtcattccatgccttgaggctggcattgctgagtttgacgattttctcaaagcccaagctgatgaagcccataaaattgctcttgattcctatgtcccagagccccacgatgtcgcccatgaactcaatttccatgttcatatggcactggaaaactccacaaggagggaactaaggcagaggaaacttagaggaggaggcaaatgtcaagcctccaaccccattgacgctt

SEQ ID NO: 85212 - DNA, 247 bp, Glycine max
  Clone ID: 700954061H1
agaaaaagagaaaagaaaaaaatgtctctagtgactgcagagatcaaagccaaagcagaggtgtatcatggagatgaactctgccaagagaagtcaaagttgctgctaaaggaggtagggctacctaatgggcttttgccattgaaggacattgaggaatgtgggtatgagagggatagtgggtttgtgtggctgaagcagaagaagagcacaaaccacaagtttgagaagattgggaagctggttt

SEQ ID NO: 85213 - DNA, 250 bp, Glycine max
  Clone ID: 700954062H1
aaaaaaaccctaggagagtcgtgaccatagcggcgcctccttcaccctaatcgattttttcttcatggagtagtgtcataatcagacacagatcatggttgttctttactggcacctccttcacctctttgtggggaatatttgactgtgaagttctgtctttctcccttgcagaggcatccattcctctttctggattggttctaacaactaataacggaggacaatctttcatagactgttctaaata

SEQ ID NO: 85214 - DNA, 252 bp, Glycine max
  Clone ID: 700954063H1
cccacttttaccactaatgtcactggcattagcttcttctgtatccctcccatttgggcaataactttctcttttcagttttctacttctcccaacactcgcggaactagaaagcctctacttccaattccacgtggcaaaaaggagagactctgattctgagccgcttctagaaccttccattgtccaagaagtttcattccacgacgacaacgaagaagaagaattccttgacgaatttgaatacgatga

SEQ ID NO: 85215 - DNA, 254 bp, Glycine max
  Clone ID: 700954064H1
ctcgagccgattcggctcgagaatcgttggacttgtcgaacaacacttttcacctggggaggcttcccaagtgggtggcttacgtcgccgataatattctctctgaagcttgtgaattgcggaataaagatgaggctagaggattttaagccttcggagacttatttctatgattttattgatctttcggggaatgaaatttcagggagtgcaattgggttggtgaatagtactgagtatttggtggggttttg

SEQ ID NO: 85216 - DNA, 267 bp, Glycine max
  Clone ID: 700954065H1
cgaagaggagagagaaacgaagaagaagagtgtttctcacatcacatggcctccttgcccttggggcaccaccaccaccaccacaaaccggcggcggcggctatacatccgtcgcaaccgccgcagtctcagccgcaacccgaagttcctcgccggagctccgatgtggagaccgataaggatatgtcagctactgtcattgaggggaatgatgctgtcactggccacataatctccaccacaattggaggcaaaaatggggaacta

SEQ ID NO: 85217 - DNA, 260 bp, Glycine max
  Clone ID: 700954068H1
gaaagagagaaacagaagtttgcagaagaaaaggaaaataaaaatactaacaaaagagagaaaagaagatgcagtgagtcacagtcatagaatagaaacagaggcaccatttccgttttccaacaacctctaccctaacgccgttataacggttcgtgcctccgcgacgcgacgcttcaactgtgaaacggacgcgacgtagtttatataaagcgccgtccctttccgtttgtgcgttaatcaatcagcaagacgatgac

SEQ ID NO: 85218 - DNA, 257 bp, Glycine max
  Clone ID: 700954069H1
aagctgcgtttcgagttgtccttcttccatgagatcatcgcccaaccattctggtgtgctttctcagagagctgctgccgccgctgctggtatgtattgcggagacacttctacaatggaagagttgcagagtgcaatccaaggagctatcgcgcattgcaagaactctttgattcagaccaacaaaacaatggtcagtaacgaaatctaagtctaattaattaatctaatcaaatcactctttttccgttgttaat

SEQ ID NO: 85219 - DNA, 251 bp, Glycine max
  unsure (1)..(251): unsure at all n locations
  Clone ID: 700954070H1
cggctcgaggattcacattattctttctcagactccttcactctgtgttgtcgtttctgtttcttcagcaattcttctcatcgtaggggaaaacatgaagttctgcaaaaagtatcaggaatacatgcaaggccaggagaagaaacttccatgtgtaggattcaagaagctcaagaagattctgaagaagtgcaggagaaactcttcatccctgaaaccccttaatgcatcccttcgncaaaacctgcccg

SEQ ID NO: 85220 - DNA, 254 bp, Glycine max
  Clone ID: 700954071H1
gaagaaaatgaaagtccttgttttctttgttgctatagttctagcagcatggcattgccatggctcagaccatgaccatgaccatggccacacctaccaaattttccctctgagaatgaaaactggccatggtggccactacattccggaggtatcatgccaaagttggaggcttggtgtggaagcacacaacgtcattgactggaaaaccgttcctcagatttgcaagggatatattgggaactgacatgctt

SEQ ID NO: 85221 - DNA, 253 bp, Glycine max
  Clone ID: 700954072H1
gtttcactgcataaatttgagagaaaactctgcaaacatgttggtttatcaggacctccttacaggtgatgagcttctctcggactccttccgttacaatgaaattgagaatggaatgctgtgggaagttgaggggaagtgggttgttaagggagcagttgatgttgacattggtgcaaacccttctgctgagggtggagaagatgagggagtcgatgacgcagctgttaaggttgttgacattgttgataca

SEQ ID NO: 85222 - DNA, 84 bp, Glycine max
  Clone ID: 700954073H1
ccttaatgtaatattggaacgaacagatattgatgatatagtgtcgtggttaatggggaatctaacatttcagagaggtcaggt

SEQ ID NO: 85223 - DNA, 251 bp, Glycine max
  Clone ID: 700954074H1
acaaaacattggcatctgatgcaggttccgagcatagtgagtcatctgaaatacggaagacaagccggacagcctcaattgaaagcctttcttccaagagtgggcacgacgaggaagaaaaatccaaagctgatcacaatgctcttcttgatgatgggtggtatattttgtcggactgaattccggagtttactgactatttgttctgctgagagtggaaaaacataggagttaatgctatattgtttata

SEQ ID NO: 85224 - DNA, 250 bp, Glycine max
  Clone ID: 700954075H1
ctcgagccgattgataaacataacctacacgatgctattcgtggacaggttgtccaactaatgaggctagattgcaagcgcgctgttcctttgttaatccagaatagggacttaataagtccacctgaagttgtgaatcaacttctaaatgcagatgataagagtgattgtagatattttttacatttatatctccactcattatttgaagtaaatcctcatgctgggaaagacttccatgatatgcagg

SEQ ID NO: 85225 - DNA, 246 bp, Glycine max
  Clone ID: 700954076H1
gggttagggttttctctcttcatcactctctgtgtcgctccgtttcaatggctcagcaagacgctcaaaacggcgggtcggagaatgccgctgctgctgctacggtgtcgtttgtcgctgtgaagccgcagctcctcgtcgaagctcccaaagccaacgacgccattctgttcttcaaggctgcgtttggcgctgaggaagttggccgtacgctcaaccctaagcgcaaagctgagcacgagctcc

SEQ ID NO: 85226 - DNA, 247 bp, Glycine max
  Clone ID: 700954077H1
caacaagaagaaggttatttattgcacaagtttgaactggagtgcggatggaagcactttgtttagtggctataccgatggtgtggtcagagtttgggctattggacgttattaggttaagctttttagtgttttcagatgcgaatctgtttttgagttttgggacaaagttagttactgctttactgtagaattgatttttatgttgaagaccgtggcactgaggccttttatttatttttaaaac

SEQ ID NO: 85227 - DNA, 246 bp, Glycine max
  Clone ID: 700954078H1
cgtgttcaacacgttccgcgcgttggagggttcttatttggatcacattaaagaagagttgggtcataagagtgtgttttcggtcgggccgttgggattcggtcgggctgagtccgacccaaatagaggatccgaggttttgcgttggcttgacgaggtggaggaagaagcgtcggtgttgtacgtttgctttgggagtcagaagttgatgagaaaggaacaaatggaagcattggcggtgggatt

SEQ ID NO: 85228 - DNA, 251 bp, Glycine max
  Clone ID: 700954079H1
gtggtgccttatcgctgtggttatcatcttcttcttcctctttcttagatctcttctttctctacgccgcacgccgaaaccatggccggaaaaggagagggtcctgctatcggaatcgatctcggaaccacctactcttgcgtcggtgtgtggcaacatgaccgcgttgaaatcatcgccaacgaccaagggaacagaaccacgccgtcttacgtcggattcactgacaccgagcgtctcatcggtgatgc

SEQ ID NO: 85229 - DNA, 253 bp, Glycine max
  Clone ID: 700954080H1
ttctcacccacccacccacacacactctctccagcgtttctctcaattgggtattgtcatttactgtgtttaattgggatgtgttgctgttgcacaaattgagatattgcaagtgaaatgaaggccaggcacatctcattcttctcttgatatttctgatggcactcgctgcaaacaaagtttctagcagtcctattgtgactaaaagaacagctctttgcagatcacatgaaaaacactatttttcctcgtc

SEQ ID NO: 85230 - DNA, 247 bp, Glycine max
  Clone ID: 700954082H1
ggaaatgtttccaggtggtacaagcacattgatgctttgttgagaatctctggtgtttctggcgagggatctggtgttattgttgagggatccctggttgcggacctgttgcaactcccccagctgctgacactaaggctgctgttgctgaggatgacgatgatgatgatgttgatttgtttggtgaagagactgaggaagagaagaaggcagctgaggaacgggcagctgcagtgaaggcatctgc

SEQ ID NO: 85231 - DNA, 255 bp, Glycine max
  Clone ID: 700954083H1
gttgtagcaaaagaagtaaacaacacacacatatataaatatttgtaagatatatatatatatatatatgatcatgggttttcttcacaagctttgggacgaaacgctggcgggtccggcaccggaaacgggtctggggaagctccgaaagtacaattcgttctccggcggaatctccgtccggtcaacggtggcggaggcagttccgataagtcgcagcatcaccattgttcggtcccagtctggtttcggaag

SEQ ID NO: 85232 - DNA, 257 bp, Glycine max
  Clone ID: 700954084H1
attcattatatttttgtgtaaatagaggaaaaactcgatggaaaaatggtggtttaattctatgttgtttaataggaagttagaatacaggtgtgaattaagtaaatcaatggatagtcttggtcctattgaaaataccagtctaagggaagaccctaaaattttaaccgatatagaaaaaaaaattcacagggatttggattatttagaaatggaaggttttttttctagcgatctgaatactgtttctaagaatg

SEQ ID NO: 85233 - DNA, 255 bp, Glycine max
  Clone ID: 700954086H1
ttctttatttataacatggagtactctgtggaaactttggaaagagatcttaagaacacgaggaaatactacgggagtggaaaaacaaaggaagcaccatggagagaatcacagcttaaagggttgcacaattttctcgtggaaaaagaggaagaattgtgacgggcctcacagcatgatttggggaagcattacgtggaggcttttagagacgagcttggaacattaaatgtaagcccttaaacttggcaacca

SEQ ID NO: 85234 - DNA, 254 bp, Glycine max
  Clone ID: 700954087H1
cgcaagtattcctccaatctccgtcgatcaccaccaccatgtcgtggctcctccgatccaccaagtctaagctcctctcttcctcttcctcttcttctctttctagaaccttcccctctctccctcgccctcagatcggagccatctctcccctccccgatcttttccaccgcaacaccgccaccatgcctttcgcgaaggaaaacgcttccggtggaaacttgaccggtcttcccaaagttcccgcgaataag

SEQ ID NO: 85235 - DNA, 229 bp, Glycine max
  Clone ID: 700954088H1
ctcttttggggtatggaattcaacaagttcagaatcagaagctatgaggggcaatctgatagggctcaagtggaagatcttgagagaagatgcgaggtagggccatcagaaagcgtgtttctcttcacagacactatgggtgaccccatttgtaggatccggaacagtcccatgtacatgatgctggtaagtgattcacacacaattactatatgccactataagggcc

SEQ ID NO: 85236 - DNA, 248 bp, Glycine max
  Clone ID: 700954090H1
gcatgacatttctcacctcacatgtgccgatttcctccgagcccctggagttcagacccctctcatcgtccgtttctccactgttatccacgaacgtggcagccctgaaaccctcagggatcccagaggtttcgctgtgaaattctacactagagagggtaacttcgaccttgtgggaaacaacttccctgtcttcttcgtccgcgatggcctcaagtttcctgacatggtccatgctctcaaaccca

SEQ ID NO: 85237 - DNA, 246 bp, Glycine max
  Clone ID: 700954091H1
gataagatagagtcatcatcttctaaaatgtattttcattattatggacaacttctgcatcagcaaaatatgttgcaggactatgtgcggacagggacctatcatgctgctgttcttgagaaccgtactgatttcattggtcgtgttgtagttgatgtgggtgctggtagtggtattttgtcattatttgctgctcaggctggtgcaaaacatgtttatgctgtggaagcatctgaaatggcagaa

SEQ ID NO: 85238 - DNA, 244 bp, Glycine max
  Clone ID: 700954092H1
gtcttgagaaaaggtttggtcagtccgctgtctttgttgcctctacgcttatggagaatggtggtgttcctcaatctgctactccagaaactcttcttaaggaggctattcatgttatcagctgtggttacgaggataaaactgattggggaagtgagataggatggatttatggttctgtcacagaagatattcttaccggatttaagatgcatgcccggggttggcggtctatatactgcat

SEQ ID NO: 85239 - DNA, 249 bp, Glycine max
  Clone ID: 700954093H1
gcaaagcgcaagttgactcattatccaaggaattgcgaagtcgtgcaactatcccagattatgcttataaggcaattgatgcattgcctgtttctgctcatccaatgactcaattcacaactggtgtcatggcccttcaggtgcagagtgagtttcagaaggcatatgagggtgggatagctaaggcaaggtattgggagccaacttatgaggatacaatgaatctaattgctcgtttgccagccattg

SEQ ID NO: 85240 - DNA, 75 bp, Glycine max
  Clone ID: 700954094H1
ctccctactaggatgctatgctcattccagctgggcgtagctgtagcgtgtcaaaaaaggaatctgcggaggtgc

SEQ ID NO: 85241 - DNA, 248 bp, Glycine max
  Clone ID: 700954095H1
ctactttcagctcctaagagcacgcatcactgttgcacttcttactcgttctccctcttttttttcttcttcttcttcttcgctaaaccccccctttatttttcctatctcactaacatcgatgggagacgagaataagaccaagtcccctgcttccggcgtgtggtccaccatcaagcctttcgtcaatggcggagctccggcatgctcgccacctgcgtcattcaacccatcgatatgatcaaggt

SEQ ID NO: 85242 - DNA, 282 bp, Glycine max
  Clone ID: 700954101H1
cacgatgttgcggcggagatcctgaaccggttgaacggtgtgaaccggagtgataggttgacggattgcatggtttcggcgttgaaatcgaggatgaatccggtggagtatcctccgccggtggcggagcttgttcaggaaggagcacgccgattcgactcagatgctcttggagaactcggtgtgcttcacggtagggttcatggcggcgaatctcgcgattctggaagccgcatttgaggagaaaacggagacgagcaggttctgcgtggtggattttga

SEQ ID NO: 85243 - DNA, 280 bp, Glycine max
  Clone ID: 700954102H1
tttcaaggctctctctattgtttaggttccaaagtcaatatacaatttctgatctctgcatctcaatccaatagatcaaatatgccttcaaacgatggtatagttatcgtggtcatgggtgtcagcggtgctggaaaaaccacaataggtcagatgctggaaaaagagttgaaatacaagtatcttgatgctgatgattttcacttagaatcaaacaaagaaaagatgcgaatgggaatccccctaaccgatgaagaccggatgccatggcttgaatcgc

SEQ ID NO: 85244 - DNA, 275 bp, Glycine max
  Clone ID: 700954103H1
ttaaaattttgatcatcatggcctgtgaaaatgacaaaaaaggccacctattacttgccctagggctagtgctctgcgtcaccctgaccttcttcccaagggtgaccgaaggagggtgccctttgcatgcgaccctaggaacgggctcacgagggggttcaagttctgcaacacgcacgtgccgatccacgtgagggtgcaggacctcatagcgaggctcacattgccggaaaaaattaggctcgtcgttaacaatgccatcgccgtgcccaggc

SEQ ID NO: 85245 - DNA, 273 bp, Glycine max
  Clone ID: 700954104H1
ccaattcattaattatccaccctaacccatcattccttcacggcgaggcaacgcaaggtgggtaccccttgctctgcctccgccgtcacctacccatcatttcaaatattcatcgacataccttttatagctatgagcgaggaaaagcatcaaaagcatcatgacaccttgtcatcatcttcttctactcctacttgttatttttcctcctcttcttcttcttcttcgccgggcgagtcggaggaggagctgcagcacatgctgctggtgccg

SEQ ID NO: 85246 - DNA, 272 bp, Glycine max
  Clone ID: 700954105H1
ttgctttctaattattcgtgttgtcagtgtctctttgaggccattttgctagctatttaataatggcaattgagaagcatgaggatgttgagagtggatatttgcacgagcccttcattcaaccagaggatgctgctgctgcttgtaaagaaaatggatcagataagagtgtgaaaaatggatccattggaatggttttgcttagcacacttgttgctgtttgtggttctttcacatttggaacttgtgtgggctattcagcacccactcaa

SEQ ID NO: 85247 - DNA, 273 bp, Glycine max
  Clone ID: 700954106H1
gatcgagataactagaaacagtgtgatgaaaatgaaggtccttgttttcttcgttgctacaattttggtagcatggcaatgccatgcgtacgatatgttccctctccgaatgaacactggctatggtgcccgtactccggaggtgaaatgcgcaagttggaggcttgctgtggaaacacacaacatctttggctttgagaccattcctgaagagtgcgttgaagcaacaaaggaatacatccatggcgaacaatatagatcagactccaaaac

SEQ ID NO: 85248 - DNA, 271 bp, Glycine max
  Clone ID: 700954108H1
tgaacttgaactatcgtgtcttcttggctttctctgttcaggatcaacatggatattgtatcacgagctttgctatttccgttggctatacttgtgctcatattaagcacaccttgctcaggtgcttttgggaagagtggaactaatgtgaaaacagctatttttctgtcccccaagtttgaacttggaccaggatcggtagccaataaatatgattatgacgctgattttccaagaggtcatatagcacttaagagtttcaatgctgaag

SEQ ID NO: 85249 - DNA, 272 bp, Glycine max
  Clone ID: 700954109H1
gttttcaaccagaccgtccttcgtcagttaactatgggctaatcacaattcaggaagcccaaaactattaaagaaaccgacaacacaaaggatttgcagaaagtgcagctacttagttccattttcatcctctctccattaactttcagtcaaaacaaaacaaaacctctttaggtgtgaaattccacgtgccaaaatcatctccgaggcaccaacatcggcagccacatatttctttatttattgaaggaatcagtatataaaacacctgc

SEQ ID NO: 85250 - DNA, 180 bp, Glycine max
  Clone ID: 700954110H1
cacaaacttccttattttcttccaaatctcaccacccagaaagcacaaaagctacacacatatccaatctgtgctgtgtcttcatttcgtccaccagattcatacacaattcacgtatacgtacaattattaaaaggaagagatggcaggagaatcatacgaggaagccatcacgagtct

SEQ ID NO: 85251 - DNA, 261 bp, Glycine max
  Clone ID: 700954112H1
acttggttttaattggtataggcttgccaaggtcttgttgattgagcgttaagtgctttaactaatcaatcccaagaccttggtttaccttgccacacaaaaaaatatataaaaaggcaaaataataataaaaaaaagagaaggcttggagccaagaaaataaacacaaagcacaagtcatggaaagaataatggttggaagtgcaacaaaggttgctttcaacctcttggtcactttcgccattgtcattccatgccttg

SEQ ID NO: 85252 - DNA, 263 bp, Glycine max
  Clone ID: 700954113H1
tggagggtgtgaattgtgaatttgtgattgtgggaaaaagatgccgcagaggcactcgaagaacaacaacgatcttgcgttcttcacgtacgatgagaagcgaaaactaggttatgggacccagaaggagaggttgggcaaggactccattaagcccttcgatgcttgctctctctgcctcaaatccctaattgatcctatgagctgccagaaaggccatctcttttgcaaagagtgcattcttcagtgcctcttgtctcaga

SEQ ID NO: 85253 - DNA, 262 bp, Glycine max
  Clone ID: 700954114H1
gttcagtgctgtatgatgttgatgaaccaactgttcgaagtcttaatggctgccgtgtggcagatcaaattcttaaacttgttccaaatgttgagcacttccgaactgcattgagatgtttaaagttttgggctaaaaggcgtggtgtttattcaaatgttactggattccttggtggtgtaaattgggctattttagttgctcgaatttgccagctctaccctaatgcaatccccagtatgttggtttctcgattcttcag

SEQ ID NO: 85254 - DNA, 264 bp, Glycine max
  Clone ID: 700954115H1
cgacgttggtgtcaatgatggatgaagtcaccacttttcccgtcataaatctctggatttcttccttcactttacatccgagttcccattggtcgtcattttccttctgattgcccttttcttaattccctgctgtgctgttattttagtcctatactttctagtcactattctttttgctataccatcatttctcgtattgtactttgcataccctacgatccagaggctggtaagagaaataacatcttaagatatagcctt

SEQ ID NO: 85255 - DNA, 267 bp, Glycine max
  Clone ID: 700954116H1
caaagatgctgttctccttgcttctcaggatataactgagtggcctgtgctcgaacccctcccatcatacggtagaggaagagacgcaccggcaggaagattcacaagcctcatatttggaccaaaccttactgatgttattgtcacaggtgaaaatggcaccatagatggtcagggtgagttttggtggcagcaatttcacaggaagaagttgaagtacactcgcccatacctgattgaattgatgttctcagacaacattcaaat

SEQ ID NO: 85256 - DNA, 279 bp, Glycine max
  Clone ID: 700954117H1
cattgaggtaatacaaaaagctctgtttccaaatatctaagtcctttactttgtatgacagaggcatcaaaaaattgatcttaaatttttctgcattaggaagtgtccacaatgtgatcctattttccgcattagaattagatgtatctgaacattttccacaaaacgcattgacctttttgttgaactaacatgaaacttggcctagtcttttctgttcaataattatctctttaaatgtccaacccaacctaaagtagttaccaagcagttactcgg

SEQ ID NO: 85257 - DNA, 271 bp, Glycine max
  Clone ID: 700954119H1
atttagaaagacattgtggttacccatagtctcatagtgtcatactgcaacacaaaacaatgggttcccttatggcaggatgggactctacccacatagatcctcaatcagccacacttaaaaggaaccgctcactcaccaaggatgaaattgatgcttactggaaatcaaagaagaagatagaggaagaacaccttagagctatttccaacttgtcagagactattcaggctagcaaaagcacagaacctgagaagaagttgcagaagtc

SEQ ID NO: 85258 - DNA, 272 bp, Glycine max
  Clone ID: 700954120H1
tgcacccaaaccctggaattaagcacgttatttcattagggttggttttgttgaacagagaaaaagagaaaagaaaattatgggaagcgatggcgtgaggaaaccaagattcctatgccttcatgggttccgaacaagcggagaaatattgaaaacacagttacataagtggcctcaatcggttctagacaacctcgatctagtatttgtggatgctccttttccttgccttggcaaatccgatgtagaaggcatttttgatcccccttact

SEQ ID NO: 85259 - DNA, 276 bp, Glycine max
  Clone ID: 700954122H1
gctcggaattcggtcgaatcgagcgaatcggctcacggctcgagcgcaaactaacatcaaccaccaccaccaccacaacaacaacgtttgtgtctggtcgtgttgtgttgttagggattcatggcaacaataaacccttgattcctctccccattctcccaagagaagggccattttgttacagtgttggacacttgcaaatggatttagaagacaagttcctcgctaaagtttctggtgttcaaagcctttcatccagtgcacaaagtactccag

SEQ ID NO: 85260 - DNA, 270 bp, Glycine max
  Clone ID: 700954123H1
ggcaaaaagtagccatcgccccaacgatcccatttcccttgacttctctacgtgaagatccttgtgtcgcatagagctagttaaaatgtctgagggaaatgcagggaaaggaaagagaatcgccatcattggcgtctcagccttattgttggtggctatggttgtggcaatcacagttggggtcaatctcaatgagaatggttccaacaatgatacagaggacaacaagaaaaatcatgttgtttcttctataaaagccgtccaaaccct

SEQ ID NO: 85261 - DNA, 268 bp, Glycine max
  Clone ID: 700954124H1
aaaaccctgaagaaagacacagccattgtttacttttcattgattgagccaaagctttgtattttctgcgataattttccattgggtggaagaaagtctcaacctttattcgaaagagcaaggatctgagttgagttgagtgatcatgtgtggtggtgcgattatctccgacttcataccggcaggtcccgccagcggggcgcggcgcgtgaccgccgacatcctgtggccgagtttgaggaagcgcttctcgaagccgctgctggac

SEQ ID NO: 85262 - DNA, 270 bp, Glycine max
  Clone ID: 700954125H1
tgagaagccactttggtttctttgcctttctcaatacattttattttccaatggaggtaggaagtgttcttaactttctgcaggacaagaccattttaattgttggagccactggctttctcgccaaaatttttctggagaagatattgagggttcaaccaaatgttaagaagctttttcttcttttaagagcttcggatgccaaatcagctaattatcgcttgcaaaatgagatcatagcgaaggacttatttattgtgctaaaggaga

SEQ ID NO: 85263 - DNA, 263 bp, Glycine max
  Clone ID: 700954126H1
ttctaatagcccttcccttcatttggagacacattattgttctttcttcctacaagcctttttccctatccaactcttttctctcatcaaaccaaaagcacccttaattcattcactttgtgatatgtctcgcaagaggctaggaaaaaagcttcaacctgccaagaaggcatggaagagcttctccaacacagtccaacacaaactccacaaactcaacatccccaagtccatgaaaaccacccttcaacgcctcctctcag

SEQ ID NO: 85264 - DNA, 267 bp, Glycine max
  Clone ID: 700954129H1
gttgctttgcaagttgcgagtctctcttcctacgacaaccgtttcctctcgccggaaaaccgacattgatctctctctccgccgatccgtccgccatgagttccggcgagctcctccacatacaaccccaggagctgcagtttccctttgaattgaggaagcagatctcatgctctttgcagttgtctaacaagactgacaactatgtggatttcaaggttaagacaacaaatcctaagaaatattgtgttagacctaacactggag

SEQ ID NO: 85265 - DNA, 87 bp, Glycine max
  Clone ID: 700954131H1
ggcagtgtttctgtattctagaagtagaaggagccccctagtgcgcgttcgttctcgacacgcttttcgcatcacacacgaatgctt

SEQ ID NO: 85266 - DNA, 267 bp, Glycine max
  Clone ID: 700954132H1
cagcgatcgaagtttcacatcagccttatccagtttagggtttcggttccttaccctacctgttgacgtatcgaaaccttaaatttgggattaggtctgagcaatctggttggtagaacctttggtcttagagagtcaagttttatgtctggattagacgatcaaattcctactgccttcgatccttttgctgatgcaaatgctgatgactcgggtgctgggtcaaaggagtatgtgcatattcgcgttcagcagcgaaatggtagg

SEQ ID NO: 85267 - DNA, 274 bp, Glycine max
  Clone ID: 700954133H1
cccaaggtgctcttattgttgcttcaactcttcaaatagtactaggctttagtggcctttggcgaaatgttgcaaggttcttaagtccactttcagcagttcctttggtatctcttgttggttttgggctttatgagttaggctttcctggggttgctaaatgtgtagagattggactgccagagcttatattactagtatttatttcacagtttgtacctcatgtgctacatgcaggaaaacatgtcttcgatcggttcgctgttttatttac

SEQ ID NO: 85268 - DNA, 270 bp, Glycine max
  Clone ID: 700954136H1
tcttgttgttgttggtgttgttcagttcttcttcctctctttgaacaacatctcacaattcattcaccttttaattcatctcactcacaaatcacaatgctcttcctttcttccttaataataataccataataatctgttacgttacggggcccaaatgtctgttacggagctcaaggagcgtcactctgctgccaccgacaccgtcaacaatctcagacaccgtttaaagcagaagcgcctttcgttgctcgacacagatatttctgg

SEQ ID NO: 85269 - DNA, 268 bp, Glycine max
  Clone ID: 700954137H1
gcgtgtgtgtgtgtgcgagagagagagacaacgaccccagacgcttccactctttctttggcggcggcgtcgttttctctacgctttacccattcattcattcattctcaggttcggggcatttcattctgattcactatggccaatggtccagcaccgttttctgagattgggaaaagggcaaaagaccttttatacaaggattacaacttcgatcacaagtttagcctctcaattccaaactccactggattggggcttatagcaa

SEQ ID NO: 85270 - DNA, 269 bp, Glycine max
  Clone ID: 700954138H1
ccagggccaggttggaattggaagctcttctatctatctctactttctattctctagtctttttctcacaacctgccatttctttctacttccattcaccataacgaaccgccaagctactagtaccttacacgattcatctctctctcatacactctatttttctctctgtcccctaccactctttcaaaataatattctggtttatctcaagcggtggaacactcttctccaccagtaccaccatccttcttcttcttcttctctcc

SEQ ID NO: 85271 - DNA, 268 bp, Glycine max
  Clone ID: 700954141H1
cagaaagcttgctgacaactgcactggtctccaaggttttctggttttcaatgctgtgggtgggggcactggctctggtcttggttcccttttgctggaacgtctttcagtggactatggcaagaagtccaagcttggtttcactgtctatccttcaccccaagtttacacctctgttgttgagccttacaacagtgtcctctccactcattcccttcttgagcacactgatgtggctgtcctgctcgacaacgaagccatttatgac

SEQ ID NO: 85272 - DNA, 271 bp, Glycine max
  Clone ID: 700954142H1
cacaaacttccttattttcttccaaatctcaccacccagaaagcacaaaagctacacacatatccaatcttttctttttcttcatttcgtccaccagattcatacacaattcacgtatacgtacaattattaaaaggaagagatggcaggagaatcatacgaggaagccatcacgagtctgaccaagcttctcagtgagaaagctgagctcggtggcgttgccgccgcaaagataaaggagctgacggcggacttgtatgccgccggttcg

SEQ ID NO: 85273 - DNA, 271 bp, Glycine max
  Clone ID: 700954143H1
ctttttaagtggctgctttcttccgtgaacagaaagggtcttcatttctagattttttggtctgaattgagatttatctgctactgctgatgtagagcatatagtaatgcgttcaatatgtaaggatagtgttatattggctgaagtgcaaaataatgcaagacgggaaataaaagagagatggtgtgtttgagggaaataaagagtagttagctgaatctaatcagggttctcaatctgatcaagaagcatccttgtcaacattgatata

SEQ ID NO: 85274 - DNA, 272 bp, Glycine max
  Clone ID: 700954144H1
ggtcaccttcaaaaccagtcaaccaacgtgatgctgatctcatccatttttgggataagttccgcaaagctcctgagggttctctcaggaaaaatgcagctcagaaacaagttttggaagcaatgtctcatagaatgcatgtagacaacagtgtaaaacttattgggaagcttttatttggtattgaaaagggtccagaagtactcaacgctgttagaccggcaggatcggcacttgttgatgattggcactgccttaaaaccatggtgagg

SEQ ID NO: 85275 - DNA, 272 bp, Glycine max
  Clone ID: 700954145H1
aaggggagcatcacttttcaacatttacaaacagataactctcttttaatacttgataatctgatcctgctccatactacgatgattccacgcacatttaatacttgatattcagacactgtttctttgttccgctgcctcgcatggcatcaacaactctcttcagcttcagactctctttgaacccactgcaccatcaacagacaacgaggccaaaatctctgctctcctctcctcgcaccaatccacgcctcgtttcttccattaacaat

SEQ ID NO: 85276 - DNA, 263 bp, Glycine max
  Clone ID: 700954146H1
ccatatccccccctagctacagagcagccaaaggggaggaataataataagcctatattctaaggccggaaaaataaaaaaggaataacaaaaatgtctggaaaggtaattatctcggctgtttctctcatcctggtggttggagtggccataggtgtggtggtggccgtcaacaagaagggcgaggatcccacacttcaatctcaacaaaaatcagtaagggttatctccaaaacactgatgaccagaagctctgccacgaa

SEQ ID NO: 85277 - DNA, 275 bp, Glycine max
  Clone ID: 700954148H1
accatccttcttcttcttcttctctccaccatatatagtatttgactatttgtaatattcatcatgttcattgtgcagtggtgaattgaagtgtttcagtttggcatcttctgatggtgctttatttataattattgtcatcaagtttcagactcattctggatcactgagttgattctcttaatgtcaagataaaaaaaataaaaggtagatgatgcatggaagcttgagaaatgcaaataaaagtagaaaagcctctagcagagaaagaaaat

SEQ ID NO: 85278 - DNA, 274 bp, Glycine max
  Clone ID: 700954149H1
ctcgagccgcgttatcatatcattccagcgtcactctgattgagagtgaagaaggtgggagatggagaagccacaaaacggagaagaaaaggaagaaaccacggcctctttctgcggttacgattctcttcaccgtcttctcaaggataatcttaacccccatcacttccaggaagtcagccgtttgcttactgggcttaattgtggaaaagcacttgaagcagtttctctctcagaatctgcaacttccctctctgcggaacatggttttgac

SEQ ID NO: 85279 - DNA, 270 bp, Glycine max
  Clone ID: 700954150H1
ggatttctttcatgagcttgatctatctagtttcttagttgatgactatttatctaggtaacctgtgttctgtagtttggaaaaatgattttccccccaggtgtagccaaattgaagacgggatctttgagaatggcatttgattttaccatgtgctgaagtatgttcacaagattttggtgtgtcaagttgccatccgttctgcaagcagcagcaaattagaatggctagcaagtctagatgaatttggtttttcttcaatgggatatt

SEQ ID NO: 85280 - DNA, 262 bp, Glycine max
  Clone ID: 700954151H1
ctttgctctttgcacctcagcacagtttcccatcgaaaactagcccatctttttccctcgtaccttttgcttcagcaacaacaacatcgtcgtcacaaatctagagatagatagatagatagagagaaacggttgaattgaagatgaaaatcactgtcatgactgctgatgaacaaatcctcaggttagatggtggatccccacgaatctgtggaaaacgtcaaagcattgctcgaggttgagacaagtgtgcctcttcaac

SEQ ID NO: 85281 - DNA, 264 bp, Glycine max
  Clone ID: 700954156H1
gctcctttgaggagacaagaattgggagtgttagtgaagtcactgagaaattcagcggcatcacgtgaagttgtggacctcagtgaggtgttgggggagcttatggagaacatagtgtataaaatggtattggggcgtgctagggatcatagattcgaattgaaaggacttgttcaccaggtgatgaacttggttggagctttcaatcttgcagattacatgccttggcttggtgcgtttgatcctcagggaataacaagacga

SEQ ID NO: 85282 - DNA, 267 bp, Glycine max
  Clone ID: 700954157H1
gggaagagaagtgaaaactacacacatagtcatataaaaacaccctcccattttggttcttgctttttgtctctcaacaataaatcccccaacacccttccaaaccacattgcttttgtgtcaaaattagaccaaagtttttcttcaccagtgatggaggaggaggatcacaaaatgtttggtcttgtctcagaaccagaggaatattgcaaagagttaggtgttgctgtcagagcagttcaaatggcatgcttcctctgtcagaaa

SEQ ID NO: 85283 - DNA, 271 bp, Glycine max
  Clone ID: 700954158H1
cacagagagtgtgtatgagaacataaagcaaagtcattttgtgaaggtgaattgctgaagagatagcagatttttgaaggaagatgaataactctgtttcagaaaacagtttcatcattgagagtgatgaagaagatgaggagaaggatttgaataaaggtggagttgatggaaacgattctgattcttccaattactcaaatgaaaaccctccacagcgaaagcccagttcttacaacatttcatggcctcagagttacaggcaatctat

SEQ ID NO: 85284 - DNA, 266 bp, Glycine max
  Clone ID: 700954162H1
ctcacaagccacgatttcaacgccacaccaaaaattccactgcaccaccaccctccccatttgtacttttcttctcattctctttccactcccctgcattctgcacacaatctagctttacgtgcttctgggcaaccgcataaggttaaactgttaagcatatcattgaaatccttttgggattggaacttgatatgatcatttgtattggggagtaagaccttgttacttttgcaaatgctaaatgttaataggatcagaagtca

SEQ ID NO: 85285 - DNA, 275 bp, Glycine max
  Clone ID: 700954163H1
ccaaaatcttcatattcatcaaactcatcaaaatgaatctgtaccactcctccaccaccaccaccaccaccaccatcttcaccgtcatattcctcctccttgcaatattattcactctcacaccccacaaggccaacggtgccacgtgtcaccctgaggaagaagcgggcctgttgggcttcaaatccggtatccgatccgacccgtccggcctgctcagtaactggatatcgggtacggactgctgcacatggaccggagtagaatgccactat

SEQ ID NO: 85286 - DNA, 270 bp, Glycine max
  Clone ID: 700954165H1
ctgtcaaaggatctcccttctgatcttcaaaagcttagatgcaaggttgctttcaacgcactacggtttgctcagccgattcaggaactcggtgacggcattgcagagagaatgcaaagcaagggaccttaccttgttcttcatctaagaatggagaaggatgtgtgggtgaggaccggatgcctccccggtttgagtcccgaatttgatgagattgttaacaatgagaggatacaacggccggagctcttgactgcaagatcaagcatg

SEQ ID NO: 85287 - DNA, 270 bp, Glycine max
  Clone ID: 700954166H1
cacaggcacaggcacaaggcgttcctcttcccgagcaagtcacagtcacagacccagacaactctgtgagtggggattccatacggcagagatttttgaatttctatgcttcccgtggtcacaaggttcttcccagtgcttctcttgtcccagatgatcccactgttctactcaccatcgcagggatgcttcaattcaagcctatcttcctaggcaagattccaagacaagtaccttgtgctgctactgctcaaaggtgcatccgtacta

SEQ ID NO: 85288 - DNA, 268 bp, Glycine max
  Clone ID: 700954167H1
caataatcccttttctcatttctttcatcttctcttactgctgtctgctaattctaatcttaattttctgtttactgtttctttcttccttcatattttatacgcttcttcttcttcaactactactctctctctcaaccttcaaagcttcaaactcaaaagcaatggcatttgatcccgtgcaacccgtcgcaaagaaagcaaggtcaggtggtgagattgtgagtgcaagagagcctctgcttaatggggttcatgactctgaaag

SEQ ID NO: 85289 - DNA, 265 bp, Glycine max
  Clone ID: 700954169H1
cttcttcgaatcccaagtctcaggtctggtaaccttttgaggttgttgggtgcagaagggagcgatggctgcttcagaggagaatagtgcactgttcccaatattcattttgacaataatggccattcctatagtgccatatacaataacaaagttgtgccgttttgccagtaagaaatcaaagagcattcactgtcagtgctctgagtgctcgcggtccgggaagtaccataaatcgatattcaagaggatttcaaatgtctca

SEQ ID NO: 85290 - DNA, 266 bp, Glycine max
  Clone ID: 700954170H1
ctctcacacacccaaacccaacattattaatactcttccttctctttaccttttacttttcgaagcaaaaacaccataacaaaacacccagaatttgtgggttccattcccaaaacaaagaacaagaaggagagagagagagagagaatgcaacgggagaaacaaaaaacagaagtatttctgtgattgattctctgcaaccgaatcatcatcagccacttcttctcccagtttcagctctcccctctctcttcttttcctcggct

SEQ ID NO: 85291 - DNA, 261 bp, Glycine max
  Clone ID: 700954172H1
gcagccactatagtaaacaatcttctctatctaaaatggagtttgttctaaactacctaaatgccactgccattggagttctttctctaaccctcttctttttgtttttgtataatcccttcaaatttgcattaggtaaaaaagaggctcccgaagttgcaggtgcatggccaatacttggtcacctaccactattgagtggttcagagacacctgatagggttttgggtgctttggctgataagtatggacccatattca

SEQ ID NO: 85292 - DNA, 265 bp, Glycine max
  Clone ID: 700954173H1
ggaatcgtctctcctccttccttcggtttcaggaaccaacaagaacaagaacaaggttccagaagacaaatggtatttagcctacattgtgtattttaccctgggtctcggttaccttctcccatggaacgctttcatcaccgccgttgattacttctcctttctctaccctgacgccagcgttgaccgcatcttcgccgtggtttacatgatagtcgggctggtggggatctccctcataatcctctacagccacaagtctgac

SEQ ID NO: 85293 - DNA, 271 bp, Glycine max
  Clone ID: 700954174H1
cgctctttagtacagcggaagaacgaagcctcctcgttcttcttcttctgcgctttctctctccctctctagaaccgtaaccgtcgtttctttctttctctctcctcaaccagagctaaagagtcaccttcttatttttctgaatctcgcggcgttgttctttctgctgctgcggctgtggttccggcggcgatgggacagcaatcgttgatctacagcttcgtcgctcgaggcaccgttatcctcgcggagtacaccgaggtcaccggaa

SEQ ID NO: 85294 - DNA, 268 bp, Glycine max
  Clone ID: 700954175H1
cactccctcctcttcacacattttcttagctctctccaacaatccctctcgttcacactttcagattgtgtgaagatgggggctggtggccgaactgctgttcctcctgccaacaggaagtcagaggctgaccctttgaagcgggtaccatttgaaaaacctcagtttagtctcagccagattaagaaggccattccacctcactgtttccagcgctctgttctccgctcattctcctatgttgtttatgacctcaccatagccttct

SEQ ID NO: 85295 - DNA, 269 bp, Glycine max
  Clone ID: 700954177H1
ggagagcattcaccattttcttgtggtttggtttcctagagacactaagtactcccatggaacaaaacaacaaaagccttgtttcttctaaattcttatgtttatgtttgttgatcaccttgatcagcattattgttgctccacaagcggaagcagcacgagcatttttcgtgtttggcgattcgcttgtagacaacgggaacaacaatttcttggccaccacggcgcgtgccgattcatatccttatggcattgattctgcatctcat

SEQ ID NO: 85296 - DNA, 271 bp, Glycine max
  Clone ID: 700954180H1
cacaacacagtttccactttccactttgactgtaccaaagtcacgcttgctccctctctcaacggcttccctcttcttcctctctctctctctctctctggacacacacatccttggtgttgaacgggtttttgggtgaaggagtagtgttggtggcttcatcttttagtgaataaggatacagcagcatgcggtggtggcttactctctctgttgatgtataccgcaaagtgatttccttgaatctgtattgcaaagttattctgtaact

SEQ ID NO: 85297 - DNA, 269 bp, Glycine max
  Clone ID: 700954181H1
gcttcaagaactatatgttttaccattcaagtgactcttgtagtagcttttctaacaacaaaggttgttttatctgatgacactgtgccaattcccgcgaacaaagcacaattaggtgaatggtataatactaatgtggggcctttagatcaaagaaagagcaccgtggacccagcattggtgactgctgaagaaggcgctaaggttgtaaaggtgatgcaagatggcagtggggaattcaagaccatcactgatgccattaaaagtat

SEQ ID NO: 85298 - DNA, 269 bp, Glycine max
  Clone ID: 700954182H1
gcaaagggaaggaaaagtaccttccccaataacccttctctccgatttggcttctctcatcggagggaaacaatcaataaaagaaaaaaaaaacccacaaaaagattataacaaaaaaagtatgaaaggaaaagtactaggttccgcagtttctctcatcctagtggtgggtgtggtaattggcgtggttgctgtagttcaaagcccaaagggcgtggaacaacaacaacaatggaggagaattgaaaaccagcaacagggccgtgaca

SEQ ID NO: 85299 - DNA, 266 bp, Glycine max
  Clone ID: 700954183H1
aaaccacacacctcacctattagaagtaacaaaagaccctccctctcaaaagaataaacaagtataaaaaagaaggcacttccctcaaaaagaaactaccctctatctctctcttttcaagccttaaatgagtaaaaaagagtgaagaaaggaaagaaaggagcaccatttttggtttgagaaacataattagcaagagagttcaaaatggggaagagagagtttaatggggtggtgttgatgatgctgtgtttgtgggtttgtgg

SEQ ID NO: 85300 - DNA, 263 bp, Glycine max
  Clone ID: 700954186H1
cttttggagaacaagactgccttcactacaaagaaagactatggcaaagaagagagagaagcacagtgggcaactgcacagaggactcttcatggtcttcagccacctgaaacaaccaaccttttcaatgacaagaacagttacagggagctgtcagagattgctgagcaagctaagagacgtgccgaggttgcaaggctcagggagcttcatactctgaaaggacatgttgagtcagtggtgaagctgaagggacttgacat

SEQ ID NO: 85301 - DNA, 262 bp, Glycine max
  Clone ID: 700954187H1
ctcccgacggaacactagttcagaccggcggattcaacgacggcgaccgcgccgtcagaaccttcaccccgtgccgcacctgcgactggaaagaaattgacgatggactcgcggcacggagatggtacgccaccaatcacatcttgccagatgggcgacaaataattatcggcggaagaagacaattcaactacgagttttaccccaagacacaagctaagaacacttacagcttaccttttctggttcaaaccaacgacgc

SEQ ID NO: 85302 - DNA, 262 bp, Glycine max
  Clone ID: 700954188H1
caaaagcttcaagcaagactttaaagtggctcaaatcaaagaaaattgatgtgaaactagaacaatcggtcgatttgagctcctcttctgaagaaaataagacatatcaaacttcaaatggagagactataaaagcagatcttcattttctatgcacagggaaaccacttggttcaacatggattagagaaactcttctaaagaatgacttggatgctgatggaaggatcaaggtcgatgagcacttgagagtgaagggcaa

SEQ ID NO: 85303 - DNA, 261 bp, Glycine max
  Clone ID: 700954189H1
ccttactctcctccctcttcatcaacgcacagcttcttcttcttctcatgccttcatagcttcctctcctctccctctttttccacatcttgtttcctatgccagcttctctttctctctgtttcgtccactctcttcatctgcacctgctacattgatggaggtggtcaaagcaattgccaagcacgaacctgcagctcctgaaagtgttgctatcagagctgatcagaagagttatagttacaagcgactcatcacatc

SEQ ID NO: 85304 - DNA, 265 bp, Glycine max
  Clone ID: 700954190H1
ttcctccactttgtcacctttattctctttcagtagaacaacagcaacctctctgccttccaaacccacattctggaatttggttccaatgagacaatcttcttctccggggcacttggccttagccttagacaatccacgtagaacacttcacgtgtcttgtggctccacatcaccacatgcttcccagagatcatcaattcaggggggtgaagcttttttcaggggtgtgttggaaagtatgcaatctgtttacttgaacaga

SEQ ID NO: 85305 - DNA, 265 bp, Glycine max
  Clone ID: 700954192H1
tttcaatcccacaacacactcattcctcattcttccactcccgcacaaaacgagctaggttgcagcaccccacagcttccctccaatccaaacacgtcctaatcccccgaaacactcttacccagaaacccatcctcaacctctcctccctcccgggcaccacctttacccccctcaagctcaaattcttcagcggcggcgccgtccgccgctccaccggcgcctcgggagccagaatgtcagccaccgcagcctccagctaggc

SEQ ID NO: 85306 - DNA, 269 bp, Glycine max
  Clone ID: 700954193H1
tgagaaataaagtagaatagactttttctgttacttctaccgcacaaaagtgagtgctactgtttatctctaatgggttcattctctggcacttgtgaaattgtcgaagtaagggaagacctaaatacagagaaacatgcaggtatatgtcagtccaattctggatatagcttggatgagaaaaatcagaagcatcctgtgcagaaactgggatataagggtaatctagatgatgatattaataagctgtttgaatcaattactcttaa

SEQ ID NO: 85307 - DNA, 260 bp, Glycine max
  Clone ID: 700954201H1
ataaggcacaagagtattcgccctgccttctccgcaatcagacacttgtcttctgcagctaaagagattactgtcagggaggctctgaactccgcactcgatgaggaaatgtcagctgatcctaaagtgttcttgatgggtgaagaggttggggaatatcagggtgcatacaagatatccaaggggctgctcgacaagtatggccccgagagggttctcgatactccaatcactgaggctgggtttactgggattggagt

SEQ ID NO: 85308 - DNA, 260 bp, Glycine max
  Clone ID: 700954202H1
cacaggcagaagaactaaaagcccagtcaaagtaaaaagtaaagcagaaaatggcggcatctctgagatgcagaaacagctcctccctcctcctaactcgcttcctcaactcagcgagtcgaaggtggttgcaaaccgtagcctacgaagaactgcgagctcacccggacaaaccctacacttcaacggcggttttcatccatggctttttgggatcctccagaaactggagatctttctctcgcaacctcttggcttct

SEQ ID NO: 85309 - DNA, 258 bp, Glycine max
  Clone ID: 700954204H1
ctcttcttcttcccacgctcctccttctcatacccttcgccaccctcgtctccgcccgccctcacctcgccggagactttctccgactgccctccgaaaccgataacgatgacaacgtccagggcacccgctgggccgtcctcctcgccggttccaatggctactggaattacagacatcaggctgatgtttgtcacgcctatcacatactaaggaaaggtggcctgaaagaagaaaatattattgtttttatgtatg

SEQ ID NO: 85310 - DNA, 255 bp, Glycine max
  Clone ID: 700954205H1
caaaatcagtctctaatatttttctcactgtcttgtctctccagagaactgtatagagagagatggcagctgcaacatctggtgctgtgttaaatgggttgggatcttccttcttgagtggaggaaacaggagccaaacccttctggccactgctattggaggcaaagttggtgctgctgctgttactgttagtcctagaagactcattgtggtagctgctgctgcaccaaagaagtcatggctccctggtgtca

SEQ ID NO: 85311 - DNA, 253 bp, Glycine max
  Clone ID: 700954206H1
aacaggactttccgttcacgacactcccttttatcgtttcacttccgtcgtcgtcgtcttcaattttggatcttcgcatcgaatcgcatcctatgggtagcagcagaggatacacgctcatggaggttggacccgacggggttgccgtcatcaccatcgtcaaccctcccgttaattcactttcctttgatgtattgcgcagtttacaggagagttttgatcaggcgatacagagagatgatgtcaaggcaat

SEQ ID NO: 85312 - DNA, 255 bp, Glycine max
  Clone ID: 700954207H1
gcaggaaggaggaaccagaatatggatccggatatggtggaaggaaggaggaatctgaatatggatcaggatatggaggaaggaagcaagaatcagaatatggatccgggtatggtggaagaaaggaggagagtgaatatggatccgggtatggagggaggagtgagtatgaggagaaacctagctatgggaggagcaactatgagagccaaggaggaggaggaagggttgagtatggttatgaggggcgtccac

SEQ ID NO: 85313 - DNA, 254 bp, Glycine max
  Clone ID: 700954208H1
attttcatcatcttcttcttctttttcatcaatcatcaccagtggttcttttccttctgagaagatcgaattgtgttttgcaaaaatgggagttccagagaaagaccctctttcccaattgagtttgcctcctggttttcggttttaccccaccgacgaggagcttctcgttcagtatctgtgccgcaaggtcgctggccaccatttctctcttccaatcattgccgaaattgacttgtacaagttcgacccat

SEQ ID NO: 85314 - DNA, 255 bp, Glycine max
  Clone ID: 700954210H1
ctttgcgcagttccctacctctcctttcaagatgcagatcttcgtcaagaccctcaccggaaagaccatcacccttgaggtggaaagctctgacaccatcgacaacgtcaaggccaagatccaggacaaggaaggaattcccccggatcagcaacgtctcatcttcgccggaaagcagctcgaggacggccgtaccctcgccgactacaacatccagaaggagtcaacccttcaccttgtccttcgtctccgtgg

SEQ ID NO: 85315 - DNA, 253 bp, Glycine max
  Clone ID: 700954214H1
ctttcgaaagattttatccaattgaaattttaaaaatgactgggataaacttaagaattcaattattgaaattgaataagtaaacaatttaattggattggtcgaatggtatcaaaaaaaatggagtactaactcccatttcttatttattattgaattaaccgatcaacttgctttgttatcgaacatttctttttgatttcaaaaattttccggaaaaaatttgaatctatttttatatgcgaatcaatcc

SEQ ID NO: 85316 - DNA, 253 bp, Glycine max
  Clone ID: 700954215H1
ctctctctctctctctctctctctctctttctctctttctttctctcttttttttctctgatgcgtttctacaaaaacacaaccttttaactgttttttcttcttctttgcttgctccttatttcttccttcgccgaatcctagaatgtcctcgtcggggttccctggcggcggtggtgcgtcggagtttttcgccggggtaggtggtttcggcggcagatccattccggcgaccagcatgaacaaccccaac

SEQ ID NO: 85317 - DNA, 254 bp, Glycine max
  Clone ID: 700954216H1
aacaaatcaaagccatggccacctccaacttctctattgttctctccgtctccctagccttctttttggtgctacttaccaaggcacactcgaccgataccgtttctttcaccttcaacaagttcaacccagtccaaccaaacattatgctccaaaaagatgctagtatttcatcctctggggtgttacaactcaccaaagttggcagcaacggcgtgcccacctcgggatctctcggtcgtgccctttacgct

SEQ ID NO: 85318 - DNA, 259 bp, Glycine max
  Clone ID: 700954217H1
ctggctcgtcactccttgctcttagccctcctcctcttcgccgcggtggccaccgccgcgatggcggtggcgcgtccgacgccgacgacatcctgatccgtcaggtggtgccagatgttggcgaagctgaagaggaggacaacctgctgaacgccgagcaccacttcgcgagcttcaaggccaagttcgccaagacctacgccaccaaggaggagcacgatcatcgcttcggcgtcttcaagtccaacctccgcagagc

SEQ ID NO: 85319 - DNA, 258 bp, Glycine max
  Clone ID: 700954218H1
gtcatctttgtcatattccaaaattaagcttgcattattcaccagaatggctaattcatatgaaaacaacttcccccctcagaagcaagacactcagcctggcaaagagtacctcatgaatccaccaccccaatacaacagctcccaatacaagccatcaaataaacttcagggaaagatagctgtagtaaccgggggtgattctggaattggacgagccgtgtgcaacttgttttcattagaaggtgctactgtgat

SEQ ID NO: 85320 - DNA, 254 bp, Glycine max
  Clone ID: 700954221H1
ctgggggatctggacgcagatgggacttggaaggatccgagaaagatgactccccacgagaaactgcaaggattttaaacagagatctagatagagaacgagctgtggctgaagccaagatgtggggagagaacttgagacaaaaaagaaaacaaagtttgcagcagggcagtcttgatgcttaattttctgccttgaggctatggaagatggaagaaaatatggggagcttatctagagaaacaactcaaaca

SEQ ID NO: 85321 - DNA, 255 bp, Glycine max
  Clone ID: 700954224H1
gcaagatcggcggcaagctccgttacgcactcaacggtgtctcccacgtcgaccccgaaacccctctcaagctcgccgagtactacggtgtcgccgacaaggtcttcaagtacaacctcatctctgacgccccagacgccgccatcgcctcccgcgaccccatcatcgcccccaacgtcatcaacgccaccttccgcaacttcatcgaagtcatcctcgagaaccccaccaaggtcacccagtcctacaaccttg

SEQ ID NO: 85322 - DNA, 252 bp, Glycine max
  Clone ID: 700954225H1
acggatctcaactcccatttctagctccctccctccctctgcttttcttctcttctcattttccttcgaacctcctaatctctccctccagcttctgggttctccattttccctcgttttctgcatctgcatttcgtagattcagttctcatcggaaaatggacgttcaccgaagacccattccttcttccggcgaacaccgacaaacccagaagctgaagaccaccaccaccaccaccaccgattcgaaat

SEQ ID NO: 85323 - DNA, 251 bp, Glycine max
  Clone ID: 700954226H1
attgaatctcagaattctctaaaagagatctttttctgctctttgaagaaagaagggtctttgcttgattttggagatgtctctgctctcagatctcatcaaccttaacctctccgataccaccgagaaggtgatcgcagagtacatatggatcggtggatcaggaatggacctgaggagcaaagcaaggactctcccaggaccagttagcgacccttcagagcttcccaagtggaactatgatggttcca

SEQ ID NO: 85324 - DNA, 251 bp, Glycine max
  Clone ID: 700954227H1
cttccttctcacccctcgccctctcacgtttttacacacgtagacacatacacattcataattcattgctatcaccacacaagcctagctcctcatatcataccactgatttatcttccctctccatcgttcgttcattcattcactctgggcgcgcgcacgtgctaggaaccatcgattcgagaatgggcaacgactgtgtgccgtcgacggcggcggcggaggtcatggcggtggtggccgttgagctc

SEQ ID NO: 85325 - DNA, 249 bp, Glycine max
  Clone ID: 700954228H1
gttgggggctgatggtggaggtttgatgcgatcaatcctctcccagaaaaccacatattgcccttccgggttttcatccttccgaggttaaggttgtgggattttcatgcttatgtgggttgtgtaatttggaaggtgattaatggcaaatggttattcctcaaatgattgtttgaaaggaatagtagaaaattggtgtctgtcaggttcacagtatcagcttggcaaattgaaatagaatagagattt

SEQ ID NO: 85326 - DNA, 253 bp, Glycine max
  Clone ID: 700954229H1
cctttagaaagttcttcatactcttccagaagcagaaaaaagtgcctttttttttttacttctttacttgaagctttctgtgttgtgctgccatggccgtgacacagttcaaccccacttgctcaaaaactcatcttcactcatctcagctcccttttctatcgaggactcttcctagacatcgccactgcactattgcgccacttcatagaactcaacaagctaggatttgttgttctgttgccccaaatga

SEQ ID NO: 85327 - DNA, 250 bp, Glycine max
  Clone ID: 700954230H1
aggcattaggtcagacagctgactggtttaggagagcattggctgttgagcctgtcaaggggaacctgcggttaagtggatattctgcttgtggacaagatggaggtgtgcaacttcctcgtggatatattgaggagggtgtctctgatgccgacttggttcttttggtgactacaagacctacaactggaagtacacttgcctgggcggtggcatgtgaacgagatcaatggggtcgtgctatagctgg

SEQ ID NO: 85328 - DNA, 252 bp, Glycine max
  Clone ID: 700954232H1
tgaagaaacaaattagaagagtgtgttgtgttgtgttgaagtagcaagctagcaaagatgtttggcatcttaggaggcaataaggggcacaagatcaagggtactgtggtgttgatgagcaagaatgtgttggacttcaacgaaatagtgtccactactcagggtggtttggttggtgctgccaccggcatcttcggtgctgccaccggtattgttggtggagttgtcgatggtgctactgccatcttcagt

SEQ ID NO: 85329 - DNA, 256 bp, Glycine max
  Clone ID: 700954233H1
tttctgcgtattattccgatcagaatcatatatcatacctaatccatgattttttgtgcatgcatgtgttcccttcattacattgcattcataattgaattttatcatccaattcgtgaaactatttatctgtttcgagtttttgtcatttgaatttggttacaaaattgaagctggatatgaaaccactcttaattagcctactaggttgcaatcgaactctgttggtgttattatttgaatgtagttagttcta

SEQ ID NO: 85330 - DNA, 253 bp, Glycine max
  Clone ID: 700954236H1
agaagaaacaccctgtacccttcttacatcttctaatttatttttctgaggacttttttatttttatttcttcgtttccaccattttctgttacgccaaactgcgtctgcgacgcgaattgtgattagtgaacggtgaatgttgaggatctgctactttttgaacattgaataaggtctatcagacaaggatttgacagaatttgtcagaatcaaattgttaattctcttctgaagatttcattcgttcgttt

SEQ ID NO: 85331 - DNA, 253 bp, Glycine max
  Clone ID: 700954237H1
atgctacaagcccaacaaacttggttttaattggtataggcgtgccaaggtcttgttaattttgagcgttaagtgctgcaactaatcagatcccaagaccttggcctaccttgccatacagaaaaaaaaaaagcaaaaaaaaagccaaggtttggagccaacaaaaataaacacaaagcacaagtcatggaaagaataatggttggaagtgcagcaaaggttgctttcaccctcttggccactttcgccattg

SEQ ID NO: 85332 - DNA, 247 bp, Glycine max
  Clone ID: 700954238H1
gagagatttgatagcctcaactcaagtaagggttttctctttgagaaaatcgtatcttacaccttttggtgaccactttgagtgagagaagagaaattaagagagatactcaaattagattcaagagagatggccatcaaccatgaaacttgggctttcattttcggtcttctaggcaacgtgatctcctttatggtgttcctcgctccattaccaactttttaccaaatctacaagaaaaaatcta

SEQ ID NO: 85333 - DNA, 251 bp, Glycine max
  Clone ID: 700954239H1
gcttgcagtgattgtctccagtgatcaaacagagcaagtgctcttccaagatgtgcttctaccgcagccagccaagttcaaatactcaccagcttttgtatattttgtggctagcttcagtgtttctggcctttatgctcttgtttctgctcttgcatctatctctgtcatccagaagccaggattcaaactgaagttcctcctccactttatcttctgggatgcactgatattggggataacagcctcag

SEQ ID NO: 85334 - DNA, 253 bp, Glycine max
  Clone ID: 700954240H1
ctcaatgggttcttcttctattacaacatcgcccgcaaccatgaccatggctgcgatcgtgctcctgttcacggtctttgccgtttcctccgccctagacatgtcgataatctcgtacgacagcgcccacgcggacaaggccgcgccgttgcgcaccgaggaggagctgatgtccatgtacgagcagtggctcgtgaagcacgggaaggtgtacaacgcgctcggcgagaaggagaagcgcttccagatcttc

SEQ ID NO: 85335 - DNA, 249 bp, Glycine max
  Clone ID: 700954241H1
gcggttacacgagatcgtgaatgaagagattgacagcgcgcgcgagaatttggagtggaagctgacgatggagaacggattcgctcgcatggacgacgaggttaatcgcaggagccagagcaaccagaccttcacctgcaggtgcgagctccagactccccactgcgacgccgtcggatccaccgccgtcgtcgccatcgtcacgccggacaaactcgtcgtttccaactgcggcgactcccgcgccgt

SEQ ID NO: 85336 - DNA, 250 bp, Glycine max
  Clone ID: 700954242H1
tggactacggttttactgccgatatggaaaccgagctggataatgtttctggtggattaactgaatggaaaggcctccttagagactattggacacgatttaaatcatattgtgagcgtacatctaatgttcatattcatcaggttgagaagatgttggaaaaaaaatttggcgattatttatttgcttctctcccagatcagagccgggtgtgtccaagttgtatggaaggcacacttatttttaaagt

SEQ ID NO: 85337 - DNA, 251 bp, Glycine max
  Clone ID: 700954244H1
ctggagtaaaaaattaaaaaaaaataagaaataataaatattattaaataaataaataaataaaaataaaacggaagtctcaagtctcaagtctgaaatagttgagttgacggaagttgaaaattttggttgagcaagagccttctctttgttccgttccgcgaccatgtctcatgagacatgcccttccgtaaagaacttccttcttttggattctgatgggaaacgtgtcgcagtcaaatacttctctg

SEQ ID NO: 85338 - DNA, 163 bp, Glycine max
  Clone ID: 700954245H1
caacaaacgctctcttgcacagagaagatccaaaattcgcaacaatctcctctttctctttcactctttcactctcccactctcattccgccgccatggacgatccaccgttgcagaaaatcgcgatttcgggacccaccctagcctccctcatccagcgctt

SEQ ID NO: 85339 - DNA, 249 bp, Glycine max
  Clone ID: 700954246H1
ggacacaaagtgaaagagaagggagctatagccataaggagaaaaactttcaaagaggtgaaagcaaaagagttcttcttttccttttttatatatacttgggtgctaagctgtgtgagttcattgacaagcctgaaatggcaactatgctgacaaaggagcatggtctgaacctcaaggagaccgagctttgcctcggtttgcctggtgggggaggcggcggcggcggcggtggtgaggtggaaactc

SEQ ID NO: 85340 - DNA, 251 bp, Glycine max
  Clone ID: 700954247H1
ctcgagccgaatcggctcgagggcaactttggggcttctacccactatgatattgtatttagatgggaaactacaatcttcatttaggcaaagctaccaagatactcctcttatcagttgccaccaccaatttcatgcctcttcccggtgccttcatttctgattcttatctgggtcgctttctcgctgttggtttaggttccttcattactttcctgggaatggcactgttgtggctaacagccatgatc

SEQ ID NO: 85341 - DNA, 256 bp, Glycine max
  Clone ID: 700954248H1
cgcgcgcgcaaaaacgcattgtgtttctctctttccgcggcgtagatctgagcagtttgggaaaccctaactgctctcaccactctctttgctttttttcctctccgatcaacgacctctttcgtcgccctaagtcatggcaggacttgcacccgagggatcacagtttgatgctcgtcaatatgataccaagatgaatgagttgcttacatctgatggacaggattttttcacatcttatgatgaggtttatgac

SEQ ID NO: 85342 - DNA, 255 bp, Glycine max
  Clone ID: 700954249H1
gaaaaatcgcagcttgacgaagctttcgagtccgcagaaaccaccgaggaaatgctcaaagtcttcagcaacatggaaggggttttcgacgagagagaacttggtttggcttctttaaaaattggccttaaacttgaccatgaaggtgaggaccctgagaaagctctttcctttgctaacagagctttgaaagctttggaaaaagataacaacaacaacaacttcccttcttctttgcctgttgccatgtgtttg

SEQ ID NO: 85343 - DNA, 254 bp, Glycine max
  Clone ID: 700954250H1
aaggaaacaaacaccaacaccaacacctcatacacttgtctgtcatagggtgatctcctttagtgagaattgagaagccaagccactcaattcatcaccttctccctctccttttccaaggaaaaaagaaaaaaaaaatcatcaattccaatggaggtttcatgcaaaattttgagaagatcaattcacagttttcttcaaaactaccactatttcacctcaactgcagcttttctagcccttcctttctcagc

SEQ ID NO: 85344 - DNA, 251 bp, Glycine max
  Clone ID: 700954253H1
gccacagttggaaaaaaaaaaaaagttgttcgagatggcacgtacgaagcaaactgctcgtaagtccacaggaggaaaggcacctaggaagcagctcgcaaccaaggctgcacgtaagtctgcaccaactactggtggtgtgaagaagccacatcgttatcgtcctggtaccgttgctcttcgtgagattaggaaataccagaagagtaccgagcttttgatcaggaagctccccttccagaggctggttg

SEQ ID NO: 85345 - DNA, 250 bp, Glycine max
  Clone ID: 700954254H1
ccttgcaacacacattgtcttgtcggcaaaatcttccaccaacaacacacagtaatggcaggctcaaacattctttctcactctccttcccttcccaaaacctacagccactccttaaaccaaaacgcgttatcccaaaagcttttttttctgcccctcaaattcaaagccaccacaaaaccacgtgctctcagagcggttctctcgcagaacgctgtcaaaacctcggtggaggacacaaagaacgctc

SEQ ID NO: 85346 - DNA, 246 bp, Glycine max
  Clone ID: 700954256H1
ttcttttcttcttcaattcatatcatatcaattagatttgttttcagagtttgctagtgagataccatggacaactacaacagcaatgacttttggaaattcagtgaccagttgaggcttgaatctggtttggccaatctgtctctgaatgattattccatttggagcaacagctacagctccaagaggcctgatcagaggaggaactttgatgtcaagggcagtgatttcaacaactcatcaaag

SEQ ID NO: 85347 - DNA, 246 bp, Glycine max
  Clone ID: 700954257H1
gtcgtccgagatcgaggttgtcgaggaggtgcagtcccgcgacgagcaatcggcggcgtctggcggcggcggcgatggcatgggggcggaggagagcctccggaacgacgtgtacacggcggcgtcgtacggggatttggagaaactgcagagattggtggagcaagagggttgccccgtcaccgagcccgacgggttgggatactacgcgcttcagtgggctgctctcaacaatcgcactgccgc

SEQ ID NO: 85348 - DNA, 247 bp, Glycine max
  Clone ID: 700954259H1
atttatggtgttgacaagtggggtaggagagcccttttccttgaaggtggagttcaaatggtcatttgccaggctgtagttgcagctgctataggagcaaagtttggaattgatggaaaccctggtgatttgccaaaatggtatgcagttgttgtggttctcttcatttgcatttacgtatcagcatttgcctggtcatggggtcccctaggttggttggtgcctagtgagatctttcccttggaga

SEQ ID NO: 85349 - DNA, 247 bp, Glycine max
  Clone ID: 700954260H1
tagtaatattattcttcgaatccattttattattcataatgggtattttcacatttgaggatgaaaccacctcccctgtggctcctgctaccctttacaaagctctagttacagatgccgacaacgtcatcccaaaggctgtcgaagccttcaggagtgttgaaaaccttgaggggaacggtggccctggaaccatcaagaagatcactttcgttgaggatggagaaagcaagtttgtgttgcacaa

SEQ ID NO: 85350 - DNA, 233 bp, Glycine max
  Clone ID: 700954264H1
cgtggctgttttacttaccgcaccacaggcccttccagttgtggtttttgttcctattttatatctcgttctcaaaatatatataatacaagtattgtatgaatttattcatgtgtaacgtataatgttgtatatatctcggagaccagactctgtattacagcatgagcaattaaaattcagcaagttgttgcaaaaaaaaaaaaaaaaaaaaaaaaaagggggggcccccg

SEQ ID NO: 85351 - DNA, 249 bp, Glycine max
  Clone ID: 700954266H1
attattatactagtcatcataaaatgaaaattttgcttgctttgtagtttatccagggaatggtatataaatagataaggctctctatctagctgtcttaagtgttgtgccatccacatcttgtctttattttctatttatgtcacctgaacactatcataatgtactggatttccaagaaaatgttatcagttaaatttgaatgcatggttcactatttcaaaaaaaaaaaaaaaggggcggccgccg

SEQ ID NO: 85352 - DNA, 248 bp, Glycine max
  Clone ID: 700954268H1
agacaatcccgaggttaggcagtttgtagagaaatgcttagcaactgtgtccctcagactttcagctagggaactcttggaggacccttttctccaaattgatgattatggatttgactcaaaagttttgcagtatcaaagagattgttatgaagtaacgccattaattagacaacctgtgaatggaatttgtatcattaacaacaacttaatgagtggggacactgataatattggtggttatgggc

SEQ ID NO: 85353 - DNA, 246 bp, Glycine max
  Clone ID: 700954269H1
gtttggttccttgtgatcgattagggttattattctttgtggttgcggaacgaagcatgctgttgctgttcgagaatggatgagttgaacggcgccatgacgacggagaatagcaatgcggaggtggttcgatgggagaggtttctgccgcggatggtgctcagagtgctgcttgtagaagctgatcattccacgcgccaaatcatcgccgcgcttcttcgcaaatgcagttacacagttattgcg

SEQ ID NO: 85354 - DNA, 246 bp, Glycine max
  Clone ID: 700954270H1
ctcgattaatcgaatctcctgctcccggtattatttcgagacgttccgtatatgagcctctccaaacaggacttattgctattgattcgatgatccccataggacgtggccaacgagaattaattattggagacagacaaacgggtaaaacagcagtagccacagatactattctcaatcaacagggacaaaatgtaatatgtgtttatgtagctattggtcaaaaagcatcttctgtggctcaag

SEQ ID NO: 85355 - DNA, 244 bp, Glycine max
  Clone ID: 700954273H1
gctttaggtgttcctgctcttccgttgacatacgtggctcacgttctggcagttgttgccagcgtcttggtcgtggtctgggtcgtcaatttcaggggtggcttggcttgggattctgataacaagtccctcatcttcaacattcatccagttcttattgttattggcttactagttcatgggggtgaagctattataagttacaaagcttttcccctaaagaaggaagtgaagaaattgatac

SEQ ID NO: 85356 - DNA, 243 bp, Glycine max
  Clone ID: 700954274H1
gtgctgctgacaaggcaaaattcaacaatgtttttgtgaagaatctatcagaatcaaccaccgatgatgagttgaagaacacttttggtgaatttggaactattactagtgctgtagtaatgagggatggggatgggaaatcaaagtgttttggatttgtgaattttgagaatgctgatgatgctgctagggctgttgaggctctcaatggcaaaaattttgatgacaaagaatggtatgttg

SEQ ID NO: 85357 - DNA, 243 bp, Glycine max
  Clone ID: 700954275H1
ctctctcgtctcacttgaaactccacaacccaattttcttttcctatgacccaattccaaatccaaatcaccaattctaattccattcttcaggagttgaattgaattcgtgatgaagagggaccacaaagatagctgcggcggcggcggcgcgcggaagggactgtgaagggtgagtgttcctcaatgcagtcaaacgggaaggcgaagatgtgggaggaagagcaacagcagcagcagcag

SEQ ID NO: 85358 - DNA, 245 bp, Glycine max
  Clone ID: 700954280H1
ctttctttcttccttctcatcacaaagacacaagctttcttcctcaactaccctacccaacttcttattccactcatcacttcctttgaaattgaaaccaccaaaattgtttttttttttctccttcactcgtagtaatattttgaaaagtgttgtgctttgggttgagaattgtggcagggcctaatgggtaactgcctagattcttctgccaaggttgatgcagctcagagctccaaatccac

SEQ ID NO: 85359 - DNA, 246 bp, Glycine max
  Clone ID: 700954281H1
atgaaaatgggttcttctttgtggactttgtgtctaattttggcttcactagcctcttctgcattctgtgcctttccacggaggccagtggatgttccattcggcagaaactacgttcccacttgggcttttgatcacatcaaatacttcaatggaggttctgagattcaacttcatcttgacaagtacactggtactggcttccagtccaaagggtcatacttgtttggtcacttcagcatgaac

SEQ ID NO: 85360 - DNA, 246 bp, Glycine max
  Clone ID: 700954282H1
attagtactctcgttaatttttttgctaattgctaattgggcacaatggaaaagcttcatgctgtgtgcatcccatacccagcacaaggccacataaacccaatgctcaagctagcaaaactccttcatgttagaggcttccacatcacctttgttaacacagaatacaaccacaaacgccttctcaaatcaagaggttctgattccctcaatagtgtcccatcatttcaatttgaaaccatccct

SEQ ID NO: 85361 - DNA, 246 bp, Glycine max
  Clone ID: 700954284H1
cttgctaatactcatttattaaaaaatatctcttccaccccaacggttcactttcccaacgtgcaaagactaattaaccacagtaatgggttgtttgtgttttattaaaaaggacaaaatcaagggaaaggtgaacagagacaacgaggtttgcacgtcggatggagctattgatagccatggtcatcctgcagttcgaaaaagaactgggacttggactactggaattttgattttagtaaacca

SEQ ID NO: 85362 - DNA, 245 bp, Glycine max
  Clone ID: 700954287H1
ttcgtctttcattttcttattcttcaccaaaccgataagcaggaaatagctagtgagactaatccatcgcacaaacctcaccgattcaatgacctctaagctaattgcttccaatctccgtcaccaaatcacaaaatcagcccaaaacctccgccgccagctcctatccacggcggcggcggcagtgccggaacacgatgggaacaactccaactctttgggaatgacgatgaagggcgttcgaa

SEQ ID NO: 85363 - DNA, 245 bp, Glycine max
  Clone ID: 700954288H1
atcttcttatagcttcatcccaaaaagctcttttccttctaaatttgattccttagttcagcattctattattatatatggcttcttcaccttcctcagaaaacaaaaacctagagggagtagctggtggtgccggagagaaacccattccacttggtgagaacgttctgcagaagcatgctgcattctttgacttgaataaagatggtgtcatctacccatgggagacttttaaagggttgcgt

SEQ ID NO: 85364 - DNA, 242 bp, Glycine max
  Clone ID: 700954289H1
tctcactcttcagatctctctcccttccttccatcccaaccacaaggttgctgagaagacataaaaaatggtgaagatttgctgcattggagctggctatgttggtggcccaaccatggctgtaattgccttgaagtgtcctgagatcgaggtggtcgtggtggacattgctgcaccgcgaatcaacgcgtggaacagcgaccacctcccgatatatgagcctggccttgatgatgtggtga

SEQ ID NO: 85365 - DNA, 243 bp, Glycine max
  Clone ID: 700954290H1
ctcgagccgctcgagccggaactttagaaaccataatacgtctctcaacagctcatgccaaattgaagttgcgcagagaggtttcaaagtctgatgttgaagctgctttgaaggttctaaattttgcaatatatcacaaagaactaacagaaatggaggagcgtgagcaagagagggagagagagctggacaggaagcgcaaggctgatcatgatgaaaatgatggtcctgatcatggtccta

SEQ ID NO: 85366 - DNA, 243 bp, Glycine max
  Clone ID: 700954291H1
gttgccttttaccggaaaagtgtttcatcttgcctttggggaatcaagcctctttgccccttcctttgaaaaggtgcaaaagagaagggaactattggcaaatgaattacatgaaagattgttgaagagtgacgatgtgattcctatgaaggttgcagacttcataacagataaaatagaaaacatcagaaccaaacgaggtatcaattctaggttggtttctcagcatatggctttcacaat

SEQ ID NO: 85367 - DNA, 172 bp, Glycine max
  Clone ID: 700954294H1
cttttggtaaaataaataagtggagtttttcttttatattatttcacataatgatcatgctagtggaattttttaaaaaaaattaatgtttacaataagaaacccaagctagttcagctgggtggtttttgcagcaaggaaaagaacaattttgttctagttatgcacaagt

SEQ ID NO: 85368 - DNA, 242 bp, Glycine max
  Clone ID: 700954295H1
cggctcgagcggctcgagagtccatgagaggtactgcttcacgataccaaaatcctatgcattggcttcagcagctcctttgctttgtgctggaattacagtttattcaccgatggtgcgccacaagatgaatcaacctggtaaatctcttggagtgattggtcttggtggcctcggatctatggcagtgaaatttggaaaggcatttggtttgagtgtgacagttttcagcactagcatat

SEQ ID NO: 85369 - DNA, 241 bp, Glycine max
  Clone ID: 700954296H1
caaatattctcactcgtcgtcttcgtctgcgccctaaccagattcaattcaaactcttctcatcaaaatccaaggctcgttcttgaaaccctaattcgatatcctcctcctcagaagaagaaggatcgatgtgggcagcttcttgcctggcgtcatgctgcgcggcctgcgcatgcgacgcctgcaggaccgtcgtatcgggaatcatccgccgttccgccaggatcgcctactgcggcct

SEQ ID NO: 85370 - DNA, 275 bp, Glycine max
  Clone ID: 700954301H1
gtcgcactccactccactccaatcagtcagatactagcgatggggaggaagcgaaaggtagcaccgaaatctactgtataagccgagcccccgttgaagcaaaactaaccataacccgaaaatgccgctcaggaatacgaagaagaggtcgaagaggaagttgaggaataagaggtagaggaagaggtcgaagaggaagaagaagaagaggaggacgaagaggacgaggaagaagaagaagaagaccataaagaccaataccagcaccaacaaca

SEQ ID NO: 85371 - DNA, 245 bp, Glycine max
  Clone ID: 700954302H1
atccaggtggagtattagtacaacaagtatttcacacggaaggtggcatattgtaacaatgtcaattgatgctgatttaggtgaagcaacatgttacttggatggtgcatatgatggctaccagagtggattaccattgtgtgtgggtagcgccattttggagcaggggacagaagtgtgggctggtcttagtccgccaacagatattgatgcatttggtacgccagatagtgacagggttgaat

SEQ ID NO: 85372 - DNA, 276 bp, Glycine max
  Clone ID: 700954303H1
ctctcacacacccaaacccaacattattaatactcttccttctctttaccttttacttttcgaagcaaaaacaccataacaaaacacccagaatttgtgggttccattcccaaaacaaagaacaagaaggagagagagagagagagaatgcaacgggagaaacaaaaaacagaagtatttctgtgattgattctctgcaaccgaatcatcatcagccacttcttctcccagtttcagctctcgcctctctcttcttttgctcggctctggttcggt

SEQ ID NO: 85373 - DNA, 275 bp, Glycine max
  Clone ID: 700954304H1
tagcaagtacgtcgtatatgtggttgatcttttgctggttgtttgttttgttccttccaattgtcagatctgaatcaccggactcactcttcacactcactcacactgaatggcttctgaaggcgaccatcaccaccaccaccaccaccatcaagatcacgatcatcatcatcatgatcatgatcaccatcatcatcacgatggagacggagagaccaactcatgggtaggtaaggatgggaaggtgtaccatagccacgatcgtctggcgcgca

SEQ ID NO: 85374 - DNA, 260 bp, Glycine max
  Clone ID: 700954305H1
gccggaataatcgttccttctcatgcttccgaaatcagttccctcagcggtaccccaacccaaaacacctgcttccaaaatcaccctaacttcttccctcacctccctcctccaaccccaaaaccctcgcacatggatcctcttcaccgtcctcttcatccagatcctcctcctctgcaacctccatagcttcccttcctcaattccacctccctctctcccatctcgccgccaccgacacgacaccgacaccggcacat

SEQ ID NO: 85375 - DNA, 255 bp, Glycine max
  Clone ID: 700954306H1
ggaacaattaaggcattgcaggaattagttctcagcatcagtaagacgggcagagcggcgatgcttgatgagattgttgactatgtgaagttcctaacgctccaggttaaggtcctgagcatgactagactgggacgagctggtgcagttgctcagcttgtagctgatgttccccattctgcagtggagggggatcaggacatagaacgtgtatccaatgagcaagcctgggacgagtggtccaatgatggcaca

SEQ ID NO: 85376 - DNA, 270 bp, Glycine max
  Clone ID: 700954307H1
gtcaaagttcaacgagattaactcgataacggtggttttaacggcgaaggacgttgccgttgagggcttctgcatgagccgctgtggcacccacggctctacccggaacgttaaaagtaatgcccgaaccgcatatatctgggttggaaactccgaaacacagtgccccgggcaatgcgcgtggccattccaccaaccgatttacgggccccagacgccgccgttagtttctcctaacggcgacgccggggttgacggaatggttattaa

SEQ ID NO: 85377 - DNA, 264 bp, Glycine max
  Clone ID: 700954308H1
gagagaacaaagcacttagtgctattcaataattacgaaaaaccaacagcgagtgttgtttttgtttggtccaggctggaccagggaatgaatagagatgagaggctttcggttgaagagaactgagttaagcggcgaagcagacgcagaatcggcggcagaaattgccaccggaagcacgtcgaagacgggtgaaccaaacacaaaattccatccaccacttctcttttcaatccccaactcaaatctgtgaagaaaatctca

SEQ ID NO: 85378 - DNA, 262 bp, Glycine max
  Clone ID: 700954310H1
ggcgaggcgtgaacgaggctcaacgtgcttatcctcggatttttggccatgaagcatctgggattgtggagagtgtaggggaaggagtgagtgaagttgaggaaggggacatagtagtgccaatattcaatggggagtgtggagagtgttcgatgtgcaagtgtgagaagaccaacttgtgtgagaggtttggggtggatgccacgaagaaggtgatggaacgagatggcacaacaagattctccactgttaatgggaaacc

SEQ ID NO: 85379 - DNA, 266 bp, Glycine max
  Clone ID: 700954311H1
gtgtgagtgagtgtatcaatcggccacacagaaatgggcagtgcttctctgattccagtttcctggttgccttggcggccactttctcctttcaagggaacggtgaaaaccttggtcgcaaaaccatggctgaagaagattcagcaagcaagacccctcatttccgtggttaacaaggctgcctctctatcttcccccgtgacagcacccagcgtcggcgttcggtttcggctggacaatttggggccgcaaccgggttcgaggaa

SEQ ID NO: 85380 - DNA, 252 bp, Glycine max
  Clone ID: 700954312H1
ctctgaacaatggcgtctctctctcacctcaacaaactcctctgcatgccgccgctcaactcttcaccctctacttcgccaccgcgcacagcgtcggagtttcgaccaaatctgtcggaaggccgaggatggtcgccgatttcgcgaggccggtggggcgtgtccgagcggtgacgagcgacgacgagtggggcccggagaacgacgaggaggcatacggcggacgagtcgcggttgaggagaaacccgacg

SEQ ID NO: 85381 - DNA, 202 bp, Glycine max
  Clone ID: 700954313H1
gttttgttctcattctgtgactctgtgcttagttaacgttaacagtgacttaagatggcggattctgcagatgtcacccacgatgttgtgtccctcctctcttctcctcaaagggactttcttcttcgaaacaacggcgatcaggttaaaattgacagcttgaagggtaagaacttggtttgtagttttcggcatcctgtgt

SEQ ID NO: 85382 - DNA, 281 bp, Glycine max
  Clone ID: 700954314H1
ctgaaacaaagaagtgaaaataacagcaaaaagtaggagctgcagcagctcccccgaagcttatctcagcggcagactctgaaagctgtttgagtagcctcaacccggagaatagcaccaatgggagaggaggaaaacaaaccagaggaacccatggcaaaggagaaaaacccagaggaagaagcaacccaagagaaaaaaccggagcaagagtccaaagaggaagttgctgctgctgctgctgctccgccaccgccaccgccaccgccaccgcccgagat

SEQ ID NO: 85383 - DNA, 281 bp, Glycine max
  Clone ID: 700954315H1
ggagttttagacccacgatcaggtcggggtcgttcaagtaaagttttccatggcattgtggaacccatattcaagcttgctgggtttagattggaggtagtcaaacaacatctgctggtcatgcgagagatcttgcatcaagtgtagacatcagctcttgccctgatggaataacctgtgttggtggtgatgggatatccattgaggttctaattgtcctcctagttagggacaatcaaaaggaaggattatctataccaattggaattataccggctggt

SEQ ID NO: 85384 - DNA, 288 bp, Glycine max
  Clone ID: 700954316H1
aaatgatgctcagaatcaagagggttcccactgtcgtttccaactaccaaaaagacgacgctgcagactctcctcgtcccgtcggaggttgtggtcggaattgcctcaaagcttgttgccttccagatgcaaagctgcctttgtatgctttcaagaaggctaatggaaaggatttggccctgcatgcatgcgccggggagcctcccctcacattcctcgactcgattcttcttggagagtgggaagatcgcatgcagagaggactttttcgctatgatgttaccgcct

SEQ ID NO: 85385 - DNA, 142 bp, Glycine max
  Clone ID: 700954317H1
ctcatctcttctgctctctcattacgctctttcctccgatctcaggtgttgtttaagcttcctgtgttggcttggtatccttgcaagttcttctgtagcagattccaaggtgaaggtgtcacgttaaagtttctttcatgtc

SEQ ID NO: 85386 - DNA, 254 bp, Glycine max
  Clone ID: 700954319H1
gctatctgcttcctcgtagtacttcattgagagagacatggacactgtactaagtactacgctgctactcatgttggcatgctccatcgtccatgttcttcgttcactacaagcaagaatgagaagaaaatcaaactacaatcttccaccaggaccctctcttctcaccatcattagaacctctaaacaactctataaaaagccacagcagacaatggccaggcttgccaaaacctatggccccataatgcgtt

SEQ ID NO: 85387 - DNA, 217 bp, Glycine max
  Clone ID: 700954320H1
gttatattgatattgctatttgttaagctcttatttcctcggccatggctaataatgaacgtgatctcttctcggcggagattgtgaatcgtggaattgaaccgtcgggacccaacgctggctcgttgacattctctgtgagggtgaggaggcgcttacgggattttctgcaatcggtgaaccttaagtacgtgaaattgggttaccattatctcat

SEQ ID NO: 85388 - DNA, 262 bp, Glycine max
  Clone ID: 700954321H1
aacaagaacataagggaaccacagcggcggtaacagaagaacaagcagagaatgggtcgagtgagaacgaagacggtgaagaaatcctctcggcaggtgatagagcgtcactactcgcgcatgaccctggacttccacacgaacaagaagcttctggaggaagtggcgataatcccgtcgaagaggctaaggaacaagatcgcggggttctcgacgcacctgatgaagcgcatccagaagggcctgtgcgcggctctccctc

SEQ ID NO: 85389 - DNA, 261 bp, Glycine max
  Clone ID: 700954322H1
cgttgctaaagcacaccgacatccaggacagtcactcaccgcagcatgcacgcgacaaacttgaaacgggctttctttcacccgtacgcaaccttctactaaatcctcgttctcttcaatctctttccttttccttctgcttccactttccaccgaatgcaagtcaagtctacaatttccaataagcttaagaaaaggaaacaaaaccacctcttagatctaatccaaaacgataccctatctataaagtcaaaacctaag

SEQ ID NO: 85390 - DNA, 266 bp, Glycine max
  Clone ID: 700954323H1
tgaagaagcattatttccacttgacttgggtgtctccgcctttctcttctcaaatcaaatcaatgagcatggcgtctctccccaattcccccgctctttcattctcctcatctctctccaccaccgccaatctcctcccatgtcgccgcttcaccgcattcccccgccgccgcgcctcttcattctccgtgcaagctaagatccgcgaaatcttcatgcccgcactcagctccaccatgaccgagggcaaaatcgtctcctggatc

SEQ ID NO: 85391 - DNA, 261 bp, Glycine max
  Clone ID: 700954324H1
cctcttttttcctcttcctcagtagtgcgattttcgattctcttctctgcaactatgcctaaccctaaggtcttcttcgacatgaccatcggcggtcaacctgccggccgcatcgtgatggagctctacgccgacgtgactccgagcaccgccgagaacttccgcgcgctctgcaccggcgagaagggcgccgggcggacggcaagcccctccactacaaaggctcgtccttccaccgcgtgatcccgaacttcatgtgcc

SEQ ID NO: 85392 - DNA, 267 bp, Glycine max
  Clone ID: 700954325H1
ccacggagagagagagagaggttttgacgcaacacactttcactgagaaaggatctctatctaccaaggagcagaataaaacccttctctctggtaagtgaataagagaatggcttcagatcggaaacttcacactttcgaggaggtggcaaagcacgaccagaccaaggattgctggctcatcatttctggcaaggtgtatgatgtcacccctttcatggaggatcatcccggacgtgatgaggttttgttatctgcaacagggaa

SEQ ID NO: 85393 - DNA, 266 bp, Glycine max
  Clone ID: 700954326H1
cggaatctgtctaaccaccctaaagatccggcggcgagccccaaaaccaaacccttcttaaaggagaatccaaaattcaattccaacacataaaatttcaagtccgaggttgcctataaaaaccactttggacccccttcgctcattgcagcctcaagaatccacacaaactcagggtagggcagagagagagagagagagagagagagagagagagaatgggagtgtgggctatcgcggtgcatggtggcgctggtgtcgaccct

SEQ ID NO: 85394 - DNA, 270 bp, Glycine max
  Clone ID: 700954327H1
cccagcctctcaattacggtgccatgggaactcttttggctcaacagcaattcttggcaacaatggctaatttccaacaccttagtaatgtcaacatgcaagatgatggtgttgctcaaatggccggacctaatggaagatcacctttgccagacatatttcaaccaaattttcaaactcaaactcctagctcaatgatcaacacttcaaggaaagaagaaactaaagcatttgactttatctcggaccatatgtcatctgctcgtgatt

SEQ ID NO: 85395 - DNA, 158 bp, Glycine max
  Clone ID: 700954328H1
acaacaccaccaccaccaccaacacctatacagggtgcacgcccattccctttatcatctccatatccatcggactcgttgttcgatgtttggttcacacacccgtacaagtcacccccgaggactggcagctactctggatattcctctcaccatcg

SEQ ID NO: 85396 - DNA, 273 bp, Glycine max
  Clone ID: 700954329H1
ccgctttcatcttctcatctcttctcttttccctgctaatcatggcaaccttgtcaactgtgaaggtttccccccattgcatgtttcaaacagcaagcaaaaatccatccactgttgccaccacaatgaagtgcccttcttcttttgggtctgtgaagagcatttccagatcttttggcttgaagtcatcctcttcatttagagtcactgccatggcttcttacaaggttaagctgattggcccagatggaacagagaacgagtttgaagcca

SEQ ID NO: 85397 - DNA, 275 bp, Glycine max
  Clone ID: 700954330H1
gaacaagacaagaaaactacaaagctatgggcaccatcatcgactcccatttcttggccttcactgcccttgtcactattgcctatcagtttttgtttttcgtcgtcactgcgctcctcaaattcgacaaagtcactgattttgctggaagtacgaattccattataattgctgcattgaccctggtcatcaaaggctcctggtattttcgacagataatcctcactttgtttgttgggatatcgggaattcgcctcggccttttcctcctattc

SEQ ID NO: 85398 - DNA, 246 bp, Glycine max
  Clone ID: 700953690H1
cagtggtgacaatgtgcccccacctgtgaatacgtttgcagagattgatttgggtgaagcacttaatcagaatataagaaggtgcaaatatgtgaagccaacacctgttcagcggcatgccataccgatatctctagctggacgggatttgatggcttgtgcgcagactggttctggaaagacagctgcattctgcttcccgattatcagtggaatcatgaggggccaacctgtgcagaggccacc

SEQ ID NO: 85399 - DNA, 249 bp, Glycine max
  Clone ID: 700953691H1
tgatttttcaattagggttttccgtgaaatgaaggagttgggtatcaaccccactgttgtcacttacaacacattgattaggcttctgtgtgattgctatagacacaaggaggcacttgcgttactccgaaccatcatgccccgtgatggctgccaccccactgccgtttcttaccattgtttttttgcctccatggagaagcctaaacagatacttgctatgtttgatgagatggtggagagtggggt

SEQ ID NO: 85400 - DNA, 251 bp, Glycine max
  Clone ID: 700953692H1
ctcttgttctctgattggcctagccagtagtagccaatttgttggagctggttgggaatggcgtcgaaaccgaaatcaaatggaaattccaaatgcaacaaaggattcgctgacagctatatgctgttgaatcctgaagacgctcatttcttcgatcttgttcatgtgctgtattcccgtaacttgggaacccgaaattttgtgaccagcaatgctgagggatcttatgagggaagcttccgccaaagatg

SEQ ID NO: 85401 - DNA, 182 bp, Glycine max
  Clone ID: 700953694H1
ctttctactgtttttcttgagattcgaagcacgaataattgtttaatctttgaaattcaaataccctggtggacttgagtttcaaaatacactttttaatatggctatcaaattatgagtctgaccctgcaaaaaaaaaaaaaaaaaaaaaaaaaaaaaaaaaaaaaaaaaaaaaggggggg

SEQ ID NO: 85402 - DNA, 256 bp, Glycine max
  Clone ID: 700953695H1
gcctcagtaatctgagagagaaacaaaaacaatgaaggtttccattgccaagttccactcccttcccctatgttttttccttctcttggccttcaacacaaaacccctcctagcagcagaaccagagccagtggttgataagcaagggaaccctttggagccaggagtagggtactacgtgtggccactttgggctgatgaaggaggcctcacactaggccaaacaaggaacaagacatgccctctttatgttatc

SEQ ID NO: 85403 - DNA, 256 bp, Glycine max
  Clone ID: 700953703H1
attaattgcaagaatggcacttcgttgcttggtgatgtccctttctgttctcttcactcttggtcttgcgagagaaagccatgccagagacgaagatttttggcatgctgtttggccaaacactcccattccaagttcattgcgagatcttctaaagcctggccctgcaagtgttgaaatcgatgatcaccctatgcaaattgaagaaacacagtacccgaaaaccttcttctataacgaagaccttcatccaggc

SEQ ID NO: 85404 - DNA, 254 bp, Glycine max
  Clone ID: 700953704H1
ctcgagccgattcggctcgaggttgatatctcgtttgccaaaaatgaccccaagattagacccattttgtgggttggttactcccgggcaagctgggggaactgccattgctgatgtaatctttggtacaactaacccaggaggaaggttacccatgacatggtacccacaaggttacttggccaaagtgcccatgacaaacatggacatgcgtccaaacccaacaacagggtacccaggaagaacctatagat

SEQ ID NO: 85405 - DNA, 253 bp, Glycine max
  Clone ID: 700953705H1
gtccatttcttcttcccatattgttctcgtgtgttgtgtgtgtcagtgttttggtgtgtgtgtgagtgagagaaagagaaaaaaagaaaagaaaaagagtgtcttggggcggttttggtttgagtttaacactttcatttcgaagatgccgcgcccagggccaaggccttacgagtgcgtgagaagggcttggcacagcgagcgccaccaacccgtgagaggttccatcattcagcagattttcagggtcgtc

SEQ ID NO: 85406 - DNA, 250 bp, Glycine max
  Clone ID: 700953707H1
ttctcattctctgtttcgctttcaccgagtaacttcactttccccaactccacctgagaaaaagatacccataattcgcacgcacgcacgcacgcacttgttctgactcagtgcttgtgttggacgcagaagaaccagaaaagaaaaacaagcacgaggagatgattaacttcgaagaaaccgagttgcgactcggcctccctggcgggtctgcgagtgatcacaacgagtcaacaacggtcaagggcag

SEQ ID NO: 85407 - DNA, 250 bp, Glycine max
  Clone ID: 700953708H1
gtggaatgaagctaagcaaattagaggtggaaactgaatatgatacgtcttaactaccatgatatatatatatagagagagagagagagagtgaagggagttagaaactttaattgataacttatttgcgtgtggattaatcttcagaatgaagtgtcccaataatcttagtggcaagaattgcctgttattttcgtcaaagtattccaagtgaagtgttctacaaatgcgatagacataactatttatt

SEQ ID NO: 85408 - DNA, 248 bp, Glycine max
  Clone ID: 700953710H1
ggtttgtacagcgtttgctttgggggcgaaaaattcagccttttccgatttgcaccaaattcaacagagaacaacaccatttgtggattgctgtaaactgcattatttggctgttagctaatggacaagggggtgccacctagcctcttcgtcaatgacggttctttcatggagaggttcaagcaacttcagcaagagcaggagaaagggaagaatgtcaaattggaggattctacaccaattaaggt

SEQ ID NO: 85409 - DNA, 108 bp, Glycine max
  Clone ID: 700953711H1
ctagcaactagcaagtgctcttctcaaaaaagcaaaaacataaagaaatggctgtcactttctctctcctgcccgccctgcccggctgccaacttccacacttgcagc

SEQ ID NO: 85410 - DNA, 160 bp, Glycine max
  Clone ID: 700953712H1
gaagaagtgaagtgcagtgatcattttgttgttgggtgtgagtcttgggtgtgaaaatgtcgcacagcgataccataccccttcacccatcttcccaatccgacatcgacgagatcgagaacctcatcaatgccagcgttcaccaatcagtcccttcggc

SEQ ID NO: 85411 - DNA, 248 bp, Glycine max
  Clone ID: 700953714H1
cgtgattctattcaattcatcatacattaaaatatcatcgttatcatatcattccagcgtcactctgattgagagtgaagaaggtgggagatggagaagccacaaaacggagaagaaaaggaagaaaccacggcctctttctgcggttacgattctcttcaccgtcttctcaaggataatcttaacccccatcacttccaggaagtcagccgtttgcttactgggcttaattgtggaaaagcacttga

SEQ ID NO: 85412 - DNA, 259 bp, Glycine max
  Clone ID: 700953717H1
tgttgctgcaccaccgaacaacttcccctgtaaatcgcgtttcgtttgtgcaaggttttaaaagatggctgatgctgaggacattcaacctcttgttgttgataatggaactggaatggtcaaggctggttttgcaggtgatgatgctcctagggccgtgttccccagcattattgggagaccacgccatactggtgtaatggttgggatgggtcagaaggatgcttacgtgggtgatgaagcccaatcaaaaaggggt

SEQ ID NO: 85413 - DNA, 254 bp, Glycine max
  Clone ID: 700953718H1
ctctctctctctctctcttccaaccttttctctgtttcttctaaaagtctcagcacagcataacataacccttcttcatcttcttcttatgtgattgacttgtgtccaccacggtgacccatttctgtatcttctggtgaaaagctaatttgttcactctaataggtgtacagtgctaaagtgtaaactttgaaacctagcttcctagttgaatcatcagaagcttataagtcgaatccatatttttctggacg

SEQ ID NO: 85414 - DNA, 253 bp, Glycine max
  Clone ID: 700953720H1
gagagagagagagagagagagggagagatcacatttcctgaactataagctatatagcacttccataatcttacaacaatggaggggaccagcagccaaagcacgtttgccttcatccctagcacaattgagacaccaagtccaagcatccctgagatatcatcatcatcttcccctggctctcttgcaagaattgcacaaagttaccctcccggctttcccagaaaggtgttagcggagattatagggacat

SEQ ID NO: 85415 - DNA, 251 bp, Glycine max
  Clone ID: 700953721H1
catcgacctcattgaaaaggctctaggaccaaagagcaagagcacagaaggggtgaaaaattggccgagcaaacacgttggagtgcattctgttggtgattatacagccattgagctaattggcagagaccgcccaggtctcttgtctgagatttcggctgttcttgccaacctccattttaatgtttttgcagcagaagtttggactcataacaggcgaattgcttgcgttctttatgtcaatgatgcaa

SEQ ID NO: 85416 - DNA, 250 bp, Glycine max
  Clone ID: 700953722H1
ctctttgttgaagtgagttctcgaggagggattgcgaagataattagagagaggaaatggaaagacgtaacttcagtctttaattttccatcaacagctacaaatgcttcttttgtgttgcggaagtactatgtttcattgctctaccattatgaacaaatctacttctttaaagctcgtgaatgggatcctattgctcctgatgtttcgcagaaccaatcgaccctgccagttcctcctccaaaaatgc

SEQ ID NO: 85417 - DNA, 247 bp, Glycine max
  Clone ID: 700953723H1
atagcattccgcaaaatggctgccaccaccttagtctctgaagtcactctcccctcctcctccggccagcggaagatgccgctgatgggcctcggcaccgcgccggaagcaaccagcgcggttaccacaaaagatgctgttcttgaggccatcaagcagggctacaggcactttgatgctgcttctgcttatggtgtggaacagtctgtgggagaaccatagctgaagcacttaagcaaggactaat

SEQ ID NO: 85418 - DNA, 248 bp, Glycine max
  Clone ID: 700953724H1
atacaattggacatgtagcggcaacagttagcatgtcaaaagttgcggtatcattcacacacattatcaagagtggtgaacctgcttttagtgttctggtttcaagatttcttttgggtgagagctttcctgtgccagtctatctgtctttaattccaatcattggtggatgtgcacttgctgctgtgactgagctcaatttcaatatgatcggttttatgggggccatgatatcgaatttggcattt

SEQ ID NO: 85419 - DNA, 249 bp, Glycine max
  Clone ID: 700953725H1
cttctccttctctctctctttttcgcctcattccattttcatctatcaatggctccagtagcagcagcatcttcagattcaatcaagccaagagatgtttgcatcgttggtgttgcacgtacaccaatgggtggatttcttggtactctgtcatctctatctgccaccaagctaggctctatagctattgaagctgctcttaaaagggccaatgttgatccatcccttgtggaagaagtattttttggg

SEQ ID NO: 85420 - DNA, 247 bp, Glycine max
  Clone ID: 700953727H1
gcctaagtattcctcaatgaccgatagcgtacaagtaccgtgagggaaaggtgaaaagaaccctatttagggagtgcaatagagaacctgagatccgatgcgaacaatcagtcgaaggagcttagagcctttacttgatatttagtaaagcgcactcactctaacggcgtaccttttgcatgatgggtcagcgagaaaatgggaacagcggcttaagccattaggtgtaggcgcctttcagaggtgg

SEQ ID NO: 85421 - DNA, 247 bp, Glycine max
  Clone ID: 700953728H1
caaaaacagagtagcctacacgtatcagagagagtgagagaagagagagaatatttctgttcgtgcagatagatagatagatggctcggagctccacaagaatgaaatgggtctccatcttcacacttctattcctctcccactcgcccctcacaaccttcgcagaagatgggctagtggcgaatggagattttgaggttagcccatcaagtgggttccctaacgaggcgattgtggagggccccag

SEQ ID NO: 85422 - DNA, 248 bp, Glycine max
  Clone ID: 700953729H1
gcggtggtgagcgaacggtgcgagaatcaatcaaagagcgttgaacagtgtaaaaacaaggtcgataacctaaagaagaggtacaaattggagcgacacagaatgagcagtggctgcatttccaccagccactggccttggttcaagcaattggaacagatcgtcggaaattctctcccggcgaagttctccgacgaggataaagcggtcatttcagccggaacttctccccggcaatcgaaaagata

SEQ ID NO: 85423 - DNA, 248 bp, Glycine max
  Clone ID: 700953730H1
cagaaattaagctagagctacatagtttttttcttttctcaccttccttctctcccttcagacaagggacgaaaaatcagagagagagagagagagagagagagaaattccaaaaccatgtcgtcccacagtcatctaagtttcgcctttggggttctaggtaacatcgcctccttcgtgtgctttctggcaccactaccgacattttatagagtttgtaagaagaaatcaaccgaaggttccaatca

SEQ ID NO: 85424 - DNA, 251 bp, Glycine max
  Clone ID: 700953731H1
accatgttgtgtcaagtgtgaactcaaaacatatttctctctttctttgtttcgattttggagtggtgttgctatctctagctccatgaactttttctaacacacaacacaagaagaggaagaaggggaacaagaagatcgaagaagaagaagaagaaagttaagatatgttgcttggaaaacgtcctcgggcaccgattatgaaaagaactacaagcatgagtggtggtttggccgtggaaaccaaaaca

SEQ ID NO: 85425 - DNA, 252 bp, Glycine max
  Clone ID: 700953732H1
ttttacttcccctatggctcgtcactccttgctcttagccctcctcctcttcgccgccgtggccaccgccgcgatggcgtggcgcgtccgacgccgacgacatcctgatccgtcaggtggtgccagatgttggcgaacgaagaggaggacaacctgctgaacgccgagcaccacttcgcgagcttcaaggcctagttcgccaagacctacgccaccaaggaggagcacgatcatcgcttcggcgtcttcaag

SEQ ID NO: 85426 - DNA, 258 bp, Glycine max
  Clone ID: 700953733H1
acacgaatgacccaatttggtttcagtttctcgaattctgggaacgtgtctccgccctctggtctcttccccttctccgcaagcaaaaccccaatttcttcttcacgaaccctaattcactcttcccattccaaatctcaatcacctttctgattcaatctttctctcctcgccaatctcttcgttcacctcgcaaatcaaggtgagggattcgaattgaaacctcaagatgccagccacagcaggaagggttcgtat

SEQ ID NO: 85427 - DNA, 254 bp, Glycine max
  Clone ID: 700953734H1
ggtttggttgggggtaaagagaatgaagattcagtgtaacgtgtgtgaggctgcggaggccaaggttctgtgttgtgctgacgaggctgcgctgtgttgggagtgtgatgagaaggttcatgcggctaacaagcttgccagcaagcaccagagagtgcctctttctacctcttcctctcatatgcccaaatgtgacatttgtcaggaagcattaggctattttttctgtctagaagatcgggctctgctctgca

SEQ ID NO: 85428 - DNA, 252 bp, Glycine max
  Clone ID: 700953735H1
tttgattctctgcttcgtcctttcattcctcttccgaatcgttaatcgttcgatcgatccatctcccgcttccaatgacaacccctaccgacaacaataacaaccctgcacaggaaaaccctaacaaaaccctagaccccaccgaaccagatccaatccctgccaccgaggacgacgccgccgccgacactaaggactccgacgccaaaaattccccgccgcccgattctggaaacgacgctccgctctccg

SEQ ID NO: 85429 - DNA, 209 bp, Glycine max
  Clone ID: 700953736H1
cctgcccgtacagcataacttatggagatggaagtacgacctctgggtcctatattaaggatgatcttacatttgaccgagttgttggtgatctccgtactgtacctgataataccagtgtgatttttgggtgtggttctaaacaatctgggacattgagttcaaccactgatacatcccttgatggaataattggttttggacaagca

SEQ ID NO: 85430 - DNA, 251 bp, Glycine max
  Clone ID: 700953737H1
tccgtgccctagcttcttcctcctccgccattgcagcagggcacacaaccttcgtcacaaacccaattcgcgagggatcggattcgccatcatggggaagaagaagaagagagtttcctcgaaggtgtggtgttattactgcgatcgcgaattcgacgacgagaagatcttggtgcagcatcagaaagccaagcacttcaagtgccatgtctgccacaagaagctctccaccgccggcggcatggccatcc

SEQ ID NO: 85431 - DNA, 237 bp, Glycine max
  Clone ID: 700953738H1
tgacaaggttgcactgattatatattattttgtagcttcgttgtttttttttctttctcatttaactttgttcttcctttttgaggggttgggtgggggttaaaataaacatatgtttgtatttttcccccgcttttaccttctgtttacatttcacaatacatggatcacaaatggtgtatgatatgaatgtcatgttctaaggcatgatagtgctttctatttgacacttttgga

SEQ ID NO: 85432 - DNA, 248 bp, Glycine max
  Clone ID: 700953739H1
cgaagacagcatgtaacaccactcatggtcgcagagatcaagtggttcaagtcaccaaagctaggagtggtcaactcaactctgatctgaggaaattggccgtgaatctcattcccttccctcgtctgcacttcttcatggttggatttgcgcctctcacctctcgcggctctcagcaataccgcgcattgacagtgccagagctgacacagcaaatgtgggatgccaagaacatgatgtgtgctgca

SEQ ID NO: 85433 - DNA, 247 bp, Glycine max
  Clone ID: 700953741H1
ctcctatctatcgtgcgtatctctttctctctccatttttatttatatatttctctccattatttggtgtgcatgctctagacacacacacaccccaccaccaccaacactgagttttagcagaaggatagagagcagaatgattcaaagaactgtgtcctttcccagtttaaggaaattgcttcttcgggctggttgttctaaatctgcttcgtccaagatcggaacttacaattgctttgcttct

SEQ ID NO: 85434 - DNA, 246 bp, Glycine max
  Clone ID: 700953744H1
cacaagttcaaaggccatggatgttgcacattttttgtttggcatctttgggaatgcttccgctctgttcctattcttggctccagtgatcacattcaagaggattattaagaacagatccacagagaagttctcgggcattccatatgtcatgacactgctcaattgtctccttttagcttggtatggtttgccttttgtgtctccccacaacatattagtgtcaacagtgaatggcactggatc

SEQ ID NO: 85435 - DNA, 248 bp, Glycine max
  Clone ID: 700953745H1
gcatagcaaaatgatagagtactgcgagtaaggaaggttccaagcctcatatcacagatttccaaggaaacaacgaacccatctcaatctgcttcttccctataatcgaacccttcaaatcgcagatcaaaatcgaagcttattatacagtgatgatgaccgtgaagcaaggtttcttctctctgcgaggctcactcctcttcttcgcaatcctcacccttctctccttcacctacctttctctcaaa

SEQ ID NO: 85436 - DNA, 226 bp, Glycine max
  Clone ID: 700953746H1
ctcgctttctcttctctctcgggttctctctcgggttctctctctctctctctctcgcacaccgaaaccgaaagcgataatatatagagagagagagagtaagaggagtgcactgcacacgaggtagagagaaggaactaactcaccgaacagtgaaaccaagacattctgaatttgagcttcggttagtaattcggagtgtgtgtgtgtatgacttcgatggctt

SEQ ID NO: 85437 - DNA, 108 bp, Glycine max
  Clone ID: 700953747H1
atcttcatcccgttcctgttccccttcctctctgtttctccattcccactcgtggagttactctccttacttttcttttctctcccgtcgcttccacagcaaccacga

SEQ ID NO: 85438 - DNA, 252 bp, Glycine max
  Clone ID: 700953748H1
cttctttctttgtttctgtgtgttcgagattgaagaagatgatgcaggctggacccggcggcatggcccaacaagcgaaccaacaatacgcacagcaacagcaacaaccctacatgatgatgccgccgcagcctcagccccctcagatgtgggccacatcggcccagcctccgtcccagtcggtggctcctccgcaacccaccagcgccgatgaggtccgtaccctctggatcggtgatttgcagtactgga

SEQ ID NO: 85439 - DNA, 257 bp, Glycine max
  Clone ID: 700953749H1
agagtaatgaattgcgcaaacaagtggatctgaattcacattcacaacaacagaacgttgctttcccctctctgctattaggagagacagacaactcactccttcgccaatcggagcatggcggagctccggcactcttcctccctcggcagccgagcctccaattctccgatgaagcgcgacgccgtcgccgtcggtagcgattcctcccctctcattcccgacaaccacctcgcccacgacgacgacgagcacga

SEQ ID NO: 85440 - DNA, 254 bp, Glycine max
  Clone ID: 700953750H1
agcatggcttccaatctgattagagtgagcacaagcttggttctagtagttttagtagctctcacagttcaaattttctacatttcacccatagatccagttttgctggatataaaacctgctccttcaaccaaagacaatcaattacagaatatcattaagcttggagaaggacttttgaaggaaccagaagatgttgttgtagataaagaagggactctctatacagctactcgagatggttggattaaaag

SEQ ID NO: 85441 - DNA, 252 bp, Glycine max
  Clone ID: 700953751H1
gttatgggggccaccaacccaccttagcaacatttggtgcggaccaatatgatgagaaaaatccaaaagagaagagttcaaaagtggctttcttctgttacttttactttgcgctcaatgtcggttctttgttctccaacactgtactagtctactatgaggatacagggatgtggacaatgggtttcttggtatcattggtctctgctgtcatagccttcttggctttcttattgggaactccaagatata

SEQ ID NO: 85442 - DNA, 249 bp, Glycine max
  Clone ID: 700953753H1
agagaaatcaccacattttgtactaaacctgcttattagtttcttaactagccttgtttttgtgttattttgcatggcttccaagcaagaaccaaagctctctttgacccttctagtggacaaagaaagaaactgtgtggttgtggctgaagcaagtggagacttgatagacatattgttcagttttctcacccttccactcggaactatcataaggcttgtgtcgaaaaagcaagggcacgacgaagc

SEQ ID NO: 85443 - DNA, 247 bp, Glycine max
  Clone ID: 700953757H1
gaagattctgactgacacaagcagagtggtacttctgaagcagattgtttcttcttcttcacactccgctgcgctgcgagatttccatgattgtcccatccatttcaggaagggtttggtgatagattcaataatcaaggtttagtatggcagattctttgatatccagaagtaaaagtgatgtaacggcaatgaaggagacacttcgtacgcagcagcaacttctggaaaagctatatgctgagtt

SEQ ID NO: 85444 - DNA, 244 bp, Glycine max
  Clone ID: 700953758H1
agtgagttttgtttatttgaaattaacaagtagcaaagatgtttggaatcatcggaggaaacaagggtcacaagataaaggggaacttggtgattatgcgaaagaatgtgttggatatcaacagcattaccagtgttaagggtgtcatcggaaccggcattaacatcattggaggagtcgtcgacaccgttactgctttggcgtcccacatctccatccagctcattagtgccaccaaggctga

SEQ ID NO: 85445 - DNA, 246 bp, Glycine max
  Clone ID: 700953761H1
cgcttccgtctcgttcggttcaaccacaaaccttcctctgaatcacttctcttactctgcaacaacgtcgttttccttcttcttcttcgtcttcttcttctttgctcacccggctcagttcgcgctctcagtaaaacgcgctcaagtgtcgccgttttctgcaaattcagctagggtttcactctcgccgcgatctctcatcctagctcgccgagttcgggttctaatcgccgcgtctaagttcac

SEQ ID NO: 85446 - DNA, 248 bp, Glycine max
  Clone ID: 700953762H1
attagctagctcgcacattaagttatataacacatatttgcttgcttagaaatactattattgaagatatggggagtgtagattatgagtaccctttgggcatgaacaactttgagagagtgcaccaagtcgaggttccaccgccacagccgtttttcaagtctctaaagtactctttgaaggagactttcttccctgatgaccctttgaggcagttcaagaacaagccagcttccaagaagttcatg

SEQ ID NO: 85447 - DNA, 219 bp, Glycine max
  Clone ID: 700953765H1
ccaagacatagcaaacgatccaaactcttttttcatttgcagcatcaaaatgagtggtagcaacgatggtagcggcagtggagctctaggtttttgaaggtggctagtgcagctgccgctacagccgccgttgccggcggtttatatgccattctttcatcctgaacctctgctagctctgagatggaagtgccgtttggcagcgcacggcgtgagagc

SEQ ID NO: 85448 - DNA, 247 bp, Glycine max
  Clone ID: 700953767H1
aattaagcaattacgtttaacactctaaaacatctctcgttggctatattatatatcctgaaaagctcactcatggcaagtatttctactgtctcggttcttgatagaaggcttgaagggaaagtggctcttatcagtggtggtgctagcggtataggtgaggccactgcaagactcttctctaagcatggagcacacgttgtgatagctgatattcaagacgatttgggtctctctctttgcaaac

SEQ ID NO: 85449 - DNA, 248 bp, Glycine max
  Clone ID: 700953768H1
gcagtttcaaagagaggatttgggattgggaaggcgagggattgcgctgcgtctcttcctcttctctttcgattcatccctcattcataatcttccaatccaacaacctcagcctcacactcacacatacacacatctgaacgcgtatcgtccctcccatggcttcaaagcgcatcctcaaggagctcaaggacttgcagaaagacccaccaacttcttgcagcgctggtccagtagctgaggacatg

SEQ ID NO: 85450 - DNA, 249 bp, Glycine max
  Clone ID: 700953769H1
gggaacctccgtgtcagtattatttaaaaactggaacctgtaaatttggtgcatcctgtaaattccaccatccaaaaaatggaggtggatatttaagccaagctccactaaatgtttacggatacccgttacggccgggtgagaaagaatgctcctactatttgaaaacggggcagtgcaaatttggtatatcttgtaaattccatcatcctcaaccggctggcacatcattgccagcatctgcacctc

SEQ ID NO: 85451 - DNA, 248 bp, Glycine max
  Clone ID: 700953771H1
aagcacgccgtgtttcgctatctctcccattctctcgcatctcaatacccttttgatttgtgaaaggaaagcaaacatgcttgatcaggtccaacaccctacaatcatggacaaggttgctggccagctccatctccgttctggtgtttctggtattaggagttatgaaggagcctactgccaccccacaatgtaccaaagaccctcttttgggaattactcgaatgctgcattgcagtatcctgtga

SEQ ID NO: 85452 - DNA, 244 bp, Glycine max
  Clone ID: 700953772H1
atggcaccaacagccaagactctgacttacctggcccaggagaaaaccctagaatcgagcttcgttcgggacgaggaggagcgtcccaaggttgcctacaacgaattcagcgacgagatcccagtgattctcttgccggaatcgacgaggtggatggacgcagaagagagatttgtgagaagatcgtggaggcttgcgagaattggggtatattccaggttgttgatcacggtgtggatcaaca

SEQ ID NO: 85453 - DNA, 245 bp, Glycine max
  Clone ID: 700953773H1
gaagtgaatggcataaaaatgcatgttgcagagaaaggagagggtccagtggtgttgttcctccacggcttccctgagctctggtactcatggcgccatcagattctctctctcagctccctcggctaccgcgccgtcgctcccgatctccgtggctacggtgacaccgaagcaccaccttcaatcagcagctacaactgcgtccacatagtgggtgatctcgttgcgcttattgactctctggg

SEQ ID NO: 85454 - DNA, 243 bp, Glycine max
  Clone ID: 700953774H1
aaaaaaaaaaatgtagaggaacctggaaacttccacgaggttttcggtgaaaaccaaatttggggctttgcatcgcaagatttaccctttccaatcaaaattcttctgccttcccctaccaattctttctctcaaccgatttatctgagtgaggggtttggccaatgacgagtggttttggtgaatcaacgagagcgtctgcaccgagcccatcatgctcggggaacagttcaaacgatgccg

SEQ ID NO: 85455 - DNA, 242 bp, Glycine max
  Clone ID: 700953775H1
ctcgagccgcataaaatgactgaggaaagggcaagatgtcattcttcaacctttagaaatcacgtattagtttatacagatcataaatcaaagcttgaagaatgacatcttgccctttcctcaagctttgatttatgatctgtataaactaatacgtgatttctaaaggtttagaagctggaattactctgtaaagaagaaaatgaaaagatacagaagataaatataggaagacaaagata

SEQ ID NO: 85456 - DNA, 240 bp, Glycine max
  Clone ID: 700953776H1
tggagacttacctgggaaaagatgatgatgtttgaagatatggggttttgtggcgatttggatatgttatgtgtttctcttggagagggggatattgctgtgagacaaactgaaccggatcctgtagttgaggatgactacagtgatgaagaaattgatgtggatgaacttgagaagaggatgtggagggacaaaatgcgtcacaagcgattgatagaacaaaccaagtccaaggaaggg

SEQ ID NO: 85457 - DNA, 247 bp, Glycine max
  Clone ID: 700953778H1
cttccgaaccaaaaaaggagagagattctaatttctaaaatctaaaccatcatgaagaacacaaacaccaacacgaaactgatcctcctccatccttatatccaaaaacaaggaagctccaatcgcttgtggcttctagcattggtatcaatcctcaccctcgcttttcttgttaccctcatttccacaagagaatccaccttcatcaccactgcaacttcttctgtgactccctcttcaaataatg

SEQ ID NO: 85458 - DNA, 248 bp, Glycine max
  Clone ID: 700953779H1
ttcagggctgatgagctaatggagttctacaaatcagatttgaaactcaagaaattcttgcatataattgaggattctcctgttttccctgttatatatgacagtaatagaactgtgttatccttacccccaattattaatggtgcacattcagccatcactctggagacaaagaatgtatttattgaatgtactgcaactgatctgacaaaggcgaagattgttttaaatacaatggtgacagcctt

SEQ ID NO: 85459 - DNA, 250 bp, Glycine max
  Clone ID: 700953780H1
ataatatcgtgtggcagactccagcgaatcccccgcaccctaacgattacgtctttcgaaacgggattcgatacgttagaccatactacttcgaattcatcgctcatgttaaaaatcggtgggcagggaaaaccattgtggatttgttcgctgaggaattcaaaggtcgaccttatgagtattatgttagtgcagtgaaatgtggaaggattcaagtggatggtgagatggtaccggtttcatacatagt

SEQ ID NO: 85460 - DNA, 252 bp, Glycine max
  Clone ID: 700953781H1
gtttcgaatagattatcctaagtctttgggaatagtgctgcaatggcttcaagtcaggaggaggtgacccttttgggagctactggaagcccatttgtgtgcagggttcatattgccctcaagttgaagggagttcaatacaaatatgtcgaagaaaatttgaggaacaagagtgaactgcttctcaaatccaacccagttcacaagaaggttccagtgtttattcacaatgagaagcccatagcagagtct

SEQ ID NO: 85461 - DNA, 250 bp, Glycine max
  Clone ID: 700953782H1
gctctcctatcttttgattaggaaagcggcacataccagggggtagcgactgtttattaaaaacacaggactctgctaagtggtaacacgatgtatagagtctgacacctgcccggtgctggaaggtcggaaggagaagtgttataagctttgaatggaagccccggtaaacggcggcagtaactctaactgtcctaaggtagcgaaattccttgtcgcataagtagcgacctgcacgaatggtgtaacg

SEQ ID NO: 85462 - DNA, 250 bp, Glycine max
  Clone ID: 700953783H1
gtaaaatctcgccgccttcacataaaaataatctttaatgaaagaatttcatatcaggtgaaattaatttatgatctttgaggtagacccgtattatctgacctatgaaaaaatccctgcttatccacgcacgatttggaacttctgaaaacacgctgaaatagatttttttttttgggtataatattgattgtagtagtattaattttatcttctgatattatatttccaattttgctgtcaaaacatt

SEQ ID NO: 85463 - DNA, 247 bp, Glycine max
  Clone ID: 700953784H1
cgcaaaacatggtggttttaaagtccacttcaccactctcatctctcacttcccacttctttaacctttcttcctcctcctcctcctcctccaaattcacctccccacactctctccgccgccgccacttccaccatgtccactccacttcaagagttgcgcaattcactatcagagcctacatggagaaccccaacacattaggcagtttcgccaacagggtcattggtgcactccccgtggtggg

SEQ ID NO: 85464 - DNA, 247 bp, Glycine max
  Clone ID: 700953785H1
ctttgcacctcagcacagtttcccatcgaaaactagcccatctttttccctcgtaccttttgcttcagcaacaacaacatcgtcgtcacaaatctagagatagatagatagatagagagaaacggttgaattgaagatgaaaatcactgtcatgactgctgatgaacaaatcatcacgttagatgtggatccccacgaatctgtggaaaacgtcaaagcattgctcgaggttgagacaagtgtgcct

SEQ ID NO: 85465 - DNA, 72 bp, Glycine max
  Clone ID: 700953786H1
agaaaacctattccgagttgtcgctcttgctcattctggttgctcagtccctctctgcctcctcattctcac

SEQ ID NO: 85466 - DNA, 245 bp, Glycine max
  Clone ID: 700953789H1
gaagaaacgatggcaagtccaggatcgcacattgttgtccttgcgttcgtgttgctcatttcatcaaaacttgcagaatgtcacaacatagttcgcttccttcctggcttccagggaccccttccttttctacttgaaactggttacgtggaagtgggtgaaactgaagcagaggagcacgcagaactcttctattattttatcgagtcagagaacgatcctaaagggaaccctctcctactttg

SEQ ID NO: 85467 - DNA, 243 bp, Glycine max; identical to SEQ ID NO: 85366
  Clone ID: 700953792H1

SEQ ID NO: 85468 - DNA, 244 bp, Glycine max
  Clone ID: 700953794H1
cagagggatcatcggctgaatctatagctgcacttgctaaagtggatgttgtcaagcagaggatggaagctgcatatgaaacgttgcaggatgctgcgggattaactcaattgagtgcaaccgtggaggatgtatttgccagtggagatcttcctcgtgctgcagaaacgttagctaacatgaggcattgcttgtctgcagttggggaggttgctgaatttgccaacataagaaagcaacttga

SEQ ID NO: 85469 - DNA, 253 bp, Glycine max
  Clone ID: 700953796H1
atgcaacaagccaaacaaacttggttttaattggtataggcttgccaaggtcttgttgattgagcgttaagtgctttaactaatcaatcccaagaccttggtttaccttgccacacaaaaaaatatataaaaaggcaaaataataataaaaaaaagagaaggcttggagccaagaaaataaacacaaagcacaagtcatggaaagaataatggttggaagtgcaacaaaggttgctttcaacctcttggtcac

SEQ ID NO: 85470 - DNA, 230 bp, Glycine max
  Clone ID: 700953801H1
cgttgttgctgcaaaaaaaaaagtgtaagcaatttaaggagagggtataaatatgtctctttcgttgcttaatttctagaaccgcgaaaaagtgcggaacgtttccaaaacgtggggggtgttgtgtaacaatttgcagtctggtctgacagcgacgatgtcgtcctgtgcgtctctgtgatgcagagtgtcttgaagtgagagggtttgtgagttggttggtagtttgg

SEQ ID NO: 85471 - DNA, 255 bp, Glycine max
  Clone ID: 700953802H1
aaaacaaagaaaaaaaaaaacccttagccaacacaaccatcatggccacctctgctattcagcaatcagcattcactggtcaaactgctctgaagcagctcaatgagttcgtccgcaagaccggtggcgccggcaaaggtcgcactaacatgcgccgcaccgtcaagagtgctcctcagagcatttggtatggccctgaccgtcccaagtacttgggtccattctcggagcagattccatcatacctgaccggag

SEQ ID NO: 85472 - DNA, 254 bp, Glycine max
  Clone ID: 700953803H1
ctcccatgaccgcagaaaaagcaaaaacatccaaaatacagaaaaagctagaaggccatctctgactaacgcgccaccaaagacctcacgcgcaaccgcagcgcgtgcgtcaatctccgtagcccttttcctttccctctctctctctctagacctcgtcgaagcaccaccatgaccacaacatctctctgaaaatcactcacacgcaaaagagagagagaatcgaaacaccccgtaagcagcacagcacaatc

SEQ ID NO: 85473 - DNA, 248 bp, Glycine max
  Clone ID: 700953805H1
gtttgttgtgagctataagctagtttatcgtgaggagaatatgaagttgtttgttttctttgttgctgcagtagttttggtagcatggccatgccatggcgcaggctaccaaaggttccctctccgaatgaaaactggctatggtgagcgttcttcggaggtaaaatgcgcaagttttaggcttgctgtggaagcacacaacatccgagcctttaaaaccattcctgaagagtgcgttgaaccaacaa

SEQ ID NO: 85474 - DNA, 244 bp, Glycine max
  Clone ID: 700953807H1
aagctaaatccgacgccaaagccgccgatagcaggttgaagcggaagggcgctggtgctgggaggaagcaatcgaggaaagctgctaaggaccctaacaagccgaagagacctccaagcgctttcttcgttttcatgtccgagttcagagagcagttcaagaaggagcatcctaacaacaaatccgtcgctgttgtcggcaaagctggtggtgaaaaatggaaatcgctatctgatgctgaaaa

SEQ ID NO: 85475 - DNA, 250 bp, Glycine max
  Clone ID: 700953809H1
caacatcatctgcagggagcatgactcccaggtctccgttgatgacaccacggacaagtcagattgacttgctcttggcagggaagggtgcttattctgaacatgatgatctgccgcagatgaatgaacttgctgacatagcgcgctgtgtggcaaatgctcctttggacgatgatcgcacgacgtcatatttattatcttgtcttgatgatttgcgggttgttgtagatagaaggaaatttgatgcact

SEQ ID NO: 85476 - DNA, 251 bp, Glycine max
  Clone ID: 700953810H1
attcctaattgtttaaacctaattctcatttcttcatcgttcgattcttctcctcctaaagatgcagatcttcgtgaaaactttgaccggtaagaccatcacccttgaggtggagtcctccgacaccatcgataacgtgaaagctaagattcaagacaaggaagggatcccacctgaccagcagagacttatctttgcgggtaaacagcttgaggatggtcgaacccttgccgactacaacatccaaaagg

SEQ ID NO: 85477 - DNA, 246 bp, Glycine max
  Clone ID: 700953811H1
ctcttctaatgtctagttctgagagcacaaacgcgagaactagaccagcgtcatggttttctaccccattctgtgttatcgttctcccggtggccgtggctgcgcttctctaccggctcgaaccattcaagccggttcttttgccggtccagctgggccggtccaccgtggcggttccggctcgtaacggccacatgcaagatggatcggaacgtgtgggtgagggacacttggagggcccggtag

SEQ ID NO: 85478 - DNA, 247 bp, Glycine max
  Clone ID: 700953812H1
caaaccagttgttgaagagagagtaattttattttttgtggtggtgattggggaactgagagagtgagtgagtggagtagcagaagagaagatgggatctgtgtgtatctgagactgtgcatcatccctgttcctaacgattcttgtggacagacagcgcactggtattttaaacaggcctgatgggttctagattcccatctcatcagctcagcaatggcctgtatgtatcaggtcgccctgaaca

SEQ ID NO: 85479 - DNA, 242 bp, Glycine max
  Clone ID: 700953815H1
gaaaatcgttgagtttatgatagaactaaaagaagtaaaagaagtaaaagaggtaatagaaaatcaaattgaaagtttggttaactcatcggatgatattaagaacaaggtactgcaattgaaattggaggttcctaaggctggagagacgcctgattcagaatcaaagagtagaattggtgattttatatttagaacatcatctagaattattatggccatacttcttagagacatgtttg

SEQ ID NO: 85480 - DNA, 231 bp, Glycine max
  Clone ID: 700953816H1
ctctagcaccacctagtatctctctaactttgagaaagtgtgtgttgtgtgttctcttctctcactaaaaaaggtttcattaattctatattatggctcagaccacagcgaatcacacagtgaccgtatctgggtgggcagctcatgattcttcgggcaagattaccccctacactttcaaaagaagggagaatggtgtgaacgatgtgacaataaagatactgtattgtg

SEQ ID NO: 85481 - DNA, 256 bp, Glycine max
  Clone ID: 700953818H1
ggcgtcgttgaggtcgccatcgacgatgaagacgtcatggagaatccccactcctacgtccacagcaacatcgcgggcctcgtcacgcttctcgaggcctgcaaatcggcgaaccctcagcccgcggtcgtttgggcctcgtccagctccgtctacgggctcaacgagaaggttccattttccgaatcggaccagaccgaccggcccgctagcctctacgccgcaaccaaaaaagccggtgaggaaatcacacaca

SEQ ID NO: 85482 - DNA, 252 bp, Glycine max
  Clone ID: 700953819H1
gcgaccccatattgcactgcaccttatctcacctctctttgactgttctccaccccagggtaatgcccacactaagttattcccaaaccacaccaatgtcgacctcttcaccactcttcctcctcctaattattattattattattcctatcctccactttcacgcggcggaaccccgccaagggacagtggcagctcctccacaaaaacatcggcattgtcgccatgcacatgcagctcctccacaacgac

SEQ ID NO: 85483 - DNA, 245 bp, Glycine max
  Clone ID: 700953821H1
caaggatcgagtgaaaccatctccaatgccagacagctggaagctgagcggagatatttgccactggtgttgtgctaggagcttacatggcactaatgacagtagtatttttctggctcatgaaggataccgacttcttctcggacaagttcggtgtgaggtctataaggaacagccccggagaaatgatggcagccctgtacctacaagtcagtattataagtcaagcactaatttttgtgaca

SEQ ID NO: 85484 - DNA, 61 bp, Glycine max
  Clone ID: 700953822H1
cagaaaatgagaaactctctcatgagttctgtctgattgcatagcattggttaggtagttg

SEQ ID NO: 85485 - DNA, 235 bp, Glycine max
  Clone ID: 700953823H1
agctattcttacctcttggcatgaccattcaaatgtcttcttttctcttagcttctcttgctgttttctttttcttctcctccttggagaagagttttgcctttcaagcagcaagaaaggaggacacagaaagcaacaatcttcatcaatatactcatcttgttcacctcaggtcactccttccttcatcttcttgcagctcttctaccaaagggcccaaaacaaaagcatcatt

SEQ ID NO: 85486 - DNA, 249 bp, Glycine max
  Clone ID: 700953824H1
ctcgccggaaaattcctcgccgtttccggttaccggcgatggcctcggcgacgtcgtttttcggcctcggtcttcgcccctccgtcccaatttgcgccaacagaaacaacggcattcgattctctcagtttcaagtctcctttggctttcgtgagaactccacttccctcaagactttgaattcaacaccgttgaagaaaagagaagctttctcaaatgggtcttcgagaacgcgaagaaacccgttgt

SEQ ID NO: 85487 - DNA, 249 bp, Glycine max
  Clone ID: 700953825H1
caagaatccacacaaactcagggtagggcagagagagagagagagagagagagagagagagagagtgggagggtgggctatcgctgtgcatggtggcgctggtgtcgaccctaatctcccactcgagcgccaagaagaagcgaaacaacttctcacgcgctgtctcaatctgggaatctctgctgtaaattctaatcttcccgccatagatgtcgtcgaacttgtggagagggaattggacacggatcc

SEQ ID NO: 85488 - DNA, 246 bp, Glycine max
  Clone ID: 700953827H1
aagaccttggatttttatattaagcttacttggacttacaccacttgctgaacgtgtgagcttcattacagaacaagttgccttttacactggtcccacagttggaggacttctgaatgctacatgtgggaatgttactgagctcataatagcaatatttgcccttagcagtaacaaaattgccgtggtcaagtattctctgttgggttctattctttcaaaccttcttctggttcttgggacctc

SEQ ID NO: 85489 - DNA, 244 bp, Glycine max
  Clone ID: 700953828H1
gttaacaaattagggttaaaatccaattttaaaattgaatactaaaataagcaaaataatcaagagattaaattcataactaggggattaaatttacaattatgagataaaggaaccaaatttacaaaattttgcaggtaggaggaattgagttgaaatcgaaagggaagcggtggtttaggttaggatttggtgagtgagtggggatggcgaagttcaatgtggtgcagaagcgaaggagagc

SEQ ID NO: 85490 - DNA, 243 bp, Glycine max
  Clone ID: 700953829H1
agcatctaagtgagatacacagtagttaggtagcaagcataagtgtctaaccttagaaacatatctgctacatatcgtgtgcattttggaattgtgccactaaaattctattcatctatggctgcctcatcttatgctatgcaatcaatccttgcaaaccctatgatccgcatttccagcgggtctagggagaaccattttggtgttcctgcttatcacatgagaaggaatgttggcctgaga

SEQ ID NO: 85491 - DNA, 173 bp, Glycine max
  Clone ID: 700953832H1
gaaaaatgggtaagacaaagacaaagacatttattttaaccaacattcaaaactgttccattttttttacgtgtgatctgaatgaattaaaattttgacgacactgaagcgaggataaaggtgtacgagttgaggaataagacgaaggcggagctactgagacccagctcaag

SEQ ID NO: 85492 - DNA, 256 bp, Glycine max
  Clone ID: 700953833H1
gttctcttgcagcaacaaggtttagtgacaccaaacagacgggaaatgggtcgtggggtcagtgctggtggtggacagagttccttggattatctctttggcagtggggtacctgccagcagtgcaaatggtgctcgcactcaaaatgcaagtgctccttcaccaccggttgataagcaaagtccagcaccagcaccagcaccagcacctgcacctgcagcagcagcagcaccagcacctgcaccagctccagcac

SEQ ID NO: 85493 - DNA, 253 bp, Glycine max
  Clone ID: 700953834H1
atttgaattttctactgttgaaatgccatatgagacatataatggggtgaatgtgaggcttaggtatgtattgaaagtgaccattaaccgtggctatgctgggagcatagtagaataccaggattttgtggttcgaaactattctccacctccacaaattaacaatagcatcaagatggaagttggaattgaagattgtttacacatcgaatttgaatacaacaaaagcaagtatcatctcaaagatgtcatc

SEQ ID NO: 85494 - DNA, 251 bp, Glycine max
  Clone ID: 700953835H1
caacaatggaggagaattgaaaaccagcaacagggccgtgacagcgttgtgccaaggctcagacgaccagaaactgtgccacgaggttctgtcatcttcgaacagcacagacccaaaggagtacatcgcaaccgtggtgagaacctcgatggacagcgtgatcaaagcgttcaacatgagcgacaggctgacggtggaacacggcaacagcagcgccggaatgaagatggctctggaggattgtaaggact

SEQ ID NO: 85495 - DNA, 247 bp, Glycine max
  Clone ID: 700953836H1
catcatttgaaaaccttggtttttttgcttcaggcttccaactgctgtatccactgcctgagccaccatcttctatgctgttttctttgccatccttgtcttcccttccaccatcttgagatgtcaccaccaaatcacttagcttctgcaactgtttcaaaaaaaaaaaaattaccacagttaagggtcacaagcttaaatttgttgggcatctttggcaacacaaataagtagtattgttaaagga

SEQ ID NO: 85496 - DNA, 246 bp, Glycine max
  Clone ID: 700953837H1
atcctctctttttctcttcgcactctccctcatggcaaggttgagaggctctatggtctcgcccctgttgctaagtacttggtcaggaacgaagatggtgtctccattgctgctctcaacctcatgaaccaggacaaaatcctcatggaaagctggtactatttgaaagatgcagtccttgaagggggtattccatttaacaaagcatatggaatgacagcctttgaataccatggaacggatcca

SEQ ID NO: 85497 - DNA, 244 bp, Glycine max
  Clone ID: 700953838H1
gtggaaagtaactttgagatgctacataaaaccacaattttgctttgcctctcttggatgtgtgaatattcttggttaaagcaacccctccttccgtttccaaaataataataaaaaagatcataaatgctaacaataggtgttccaacacctatataaataaatctgctgcccatgatatcgatgggggttccaaaacctttcctgtcttgatccattgtaggttcttaacttctttcatatt

SEQ ID NO: 85498 - DNA, 246 bp, Glycine max
  Clone ID: 700953839H1
ttgattttccctcttctctttttctctctcgtgagtctcgtccctgaagcgaaattctagaatggcggaagaagctcctgcatctgaaacctccgtcacaatgcctcaaccggcggaagtcatcaccgtcgacggaaccctaacctcttccgagaatgacaagagcggaatctccgtcgatgccgccgcgcacggcggtgaaaagacggtgtccaacgctgaaccttccggtagcgatcctcagaa

SEQ ID NO: 85499 - DNA, 245 bp, Glycine max
  Clone ID: 700953840H1
ggaaaaaaaaaaaacgaaaatgctgagaatcgccgcaagcgcaaagagaattgttcaaacggcgtcgttggaggcgccaccgttggggattagggttctgccgcgtctctaccacgaaagggtggtggaccactacgacaacccccgcaacgttggatccttcgacaagaacgaccccaccgtcggaacgggtctttttggtgcacccgcgtttggcgacgtcatgaagctccagattaaggttg

SEQ ID NO: 85500 - DNA, 233 bp, Glycine max
  Clone ID: 700953842H1
ggctcgagtctcacgttttccgcttcagtttcctcgggaaaatcatgctgaaaggtccaggcctctactctgacattggcaagagagctcgcgatcttctgttcaaggattatcagaatgaccacaagttcaccatcaccacttacacttccaccggagtggaaatcacttcaactggagtcaggaaaggtgagatatatttggccgatgtcagcactaaggtgaagaacaag

SEQ ID NO: 85501 - DNA, 242 bp, Glycine max
  Clone ID: 700953845H1
tcttgttgttcatggcttggctgatgcttgtagattcgtttgtaatgatgcaaagtttctctcacgtggcataatgaggttggatgctcgtgcacgtcaagatgttgcttttcttgggactgaatttctcaaacttgatgctcgggcaagagaggatactgagaaaattgaccgtgatgtcaaggaaaaagctagccgacttagtcatattgctactatattgaaggataaagctcagtcca

SEQ ID NO: 85502 - DNA, 241 bp, Glycine max
  Clone ID: 700953846H1
aggactcaaggtgaagcaccctgtggtttttgtgcccgggattgtcactggggggcttgaactgtgggagggtcacctgtgtgctgaggggttgttcaggaaacgcttatggggtggtaccttcggagaagtttataaaagaccttcatgctgggtggatcacatgtcactggacaatgaaacaggattggatccaccagggataagagttaggcctgtctctggacttgtagctgctgat

SEQ ID NO: 85503 - DNA, 239 bp, Glycine max
  Clone ID: 700953847H1
ggctactggaattacaggcaccagtctgatgtttgccatgcatatcaactactgaggaaaggtggtgtgaaagaggaaaatattgttgtatttatgtatgatgacattgctttcaatgaagagaacccacggcctggagtcattattaacagtccacacggaaatgatgtttacaagggagttcctaaggattacgttggtgaagatgttactgttgacaacttttttgctgctatact

SEQ ID NO: 85504 - DNA, 258 bp, Glycine max
  Clone ID: 700953849H1
ctccaccaatgtcgctgctgccgccgccgaaacctcaccggagctccggtaactcccctggcgacagcattccagactggatctccgaatcaatcaacggcggctccctccgccgcgtcgacctcaactccggcaccaacggctgggcgtcgccgccaggctccgtgttctccctccgctccgagagttactttgagaaccgccaaaaatctcccgccggcgactacctcctctcgccggcgggcatggactggctca

SEQ ID NO: 85505 - DNA, 247 bp, Glycine max
  Clone ID: 700953851H1
gaaaaaaggtcgttggagtctactcctgatcccattagaataaaaaggtgttggaatagagggaagaacgtggaaagtggttgacgaagaagacgaagaagaagaatggagaagtcagggaagagagtgttgcttacctccaacggcgacgacatttctcaaggcattgccttccatttggtgaagcaagggtgcaggttggttttgctgggagatcagaattccctgcggacatcgcgaacaaaat

SEQ ID NO: 85506 - DNA, 248 bp, Glycine max
  Clone ID: 700953852H1
tcccgaatcaatgtaccgagttataaagcactacactactatgaaccagagaatgcctctcatctatgtgaaactgtatacatatcaaatctttaggggattagcatatatccataccgcactgggagtttgccatagggatgtgaagcctcaaaatcttttggttcatcctcttactcaccaagttaagctatgtgattttgggagtgccaaagttctggtcaagggtgaatcaaacatttcataca

SEQ ID NO: 85507 - DNA, 244 bp, Glycine max
  Clone ID: 700953854H1
ctccaagagaaacttgtatctgacctgttggatattggggagatttcttatgctccctcaaggctgaaagaattggaattctgttctgaggagtttgaaaattatgttccttgctttaatgtttctgacaatctagctcttggtttttctgatggaaatgagtttgaccggcaatgtcgtcatgagctcaggcaaaattgtttagttctctctccaccaaattacaagattcctcttaggtggc

SEQ ID NO: 85508 - DNA, 240 bp, Glycine max
  Clone ID: 700953855H1
cacaattctttttttttttattgtgtatccaattccaaattcacccgtaaaataccttcctttgtctcaccagccatatgtgtatgatggaaggagatgagaatattcaagcatcaacaaagggaaaaaatgtggaaagcttcaccagcttggaggcaccaaggaagaaaagcaagaggatagaaaacaagaggaggtttagtgatgaacagttaagatcactagaatgcatatttgagt

SEQ ID NO: 85509 - DNA, 247 bp, Glycine max
  Clone ID: 700953856H1
ccagttttcatttcaattccatctacgagactacttatcttttataagcatgttctaatagatcaatgactagttgtatgtttgtgatacttattagataaagtttttccccctaatgataatatggaaaatggcatttgtgaacatgaacattgtagagggaaatctaagtgaacatggctgttgaatattagcagctgcccttaatgtggagtatcttgagctaggaaaaaaaattggcacaaaa

SEQ ID NO: 85510 - DNA, 249 bp, Glycine max
  Clone ID: 700953857H1
gtttgattggaacgacgaagagctagctaacataatatggggtgaaggaggtgagagtgatgatcatattgtgccttatccagaggtaaatgaagatgttagcaacaaaaaagaatggaatcaagaagctgctgcgactaagctcactgagctgaagagaccggaggctaaaactgattttcatgaaagaaagctaggaagcagttccaaccttgataatagtggagaactacctacctcaggatatgg

SEQ ID NO: 85511 - DNA, 246 bp, Glycine max
  Clone ID: 700953859H1
ggtgtttctccgagttgcttcaattgaatggctcttcagcttccaccacttcctggccgtgccatgcgcttcaactcaagcgtgtgctcccttcctgcacgaaaatctagcacctttgccactctgtcacaaccccgaagcgactgggttgaagccactaacagtttcttcgaccaagacaaacgacccatcatgttatttgacggagtatgcaacttgtgcaacgggggtgtgaagttcgttcgt

SEQ ID NO: 85512 - DNA, 240 bp, Glycine max
  Clone ID: 700953862H1
cgaagagggtggggagaagatttagtgttgtggccatggcggagtctgagaagagtactgtgcttgttacgggagccggtggtcgcacaggacaaatagtttacaaaaaattaaaagagaggccaaaccaatatgtggctagaggtctggttagaacagatgaaagcaaacagaacattggtgctgcagatgacgtttttgttggggatataagacatgctgaaagtattgttcctgcaa

SEQ ID NO: 85513 - DNA, 206 bp, Glycine max
  Clone ID: 700953864H1
gggaacttctccaaccacctctttgctgttgagtttgacacagcaaaggattttgagtttggggacattgatgacaaccatgttggaattgacatcaatagcttggcctccaatgcctctgcatctgaaggttactacactggggatgatgattcaagcaaacagaatctcaccctcaaaagtagggtacatattctagctggggt

SEQ ID NO: 85514 - DNA, 250 bp, Glycine max
  Clone ID: 700953867H1
cttttgctttaccaaattccattttccaattcaaaaccctaactccgttcgaagcaccaaatcgtgatggcaccaaaggcagagaagaagccagcagagaagaagcctgtggaggagaagaaatcgacggtgggagacaaggctccggcggagaagaagccaaaggccggaaagaagcttccgaaggagggaggcgccggcggagaaggtaagaagaagaagagaaacaagaagagcgtggagacataca

SEQ ID NO: 85515 - DNA, 245 bp, Glycine max
  Clone ID: 700953868H1
gccgcagcttgaaacagagcagagcgaccttgaagagctatggctgtcggaaagaataagaggatttccaagggaaagaagggtggcaagaagaaagcgttagtgcccattcccttcttcactcttttattctctcctttaaactctgatttctttcttcttcttccgtgattccacagcgctgatccctttgccaagaaagactggtacgatatcaaggccccttccctcttccaggtcaagaa

SEQ ID NO: 85516 - DNA, 244 bp, Glycine max
  Clone ID: 700953869H1
tgcttgccaactttgggatggagctcaaatgtgaaaactgaaccaattatttgtgctttgcaaaactgtaagctccctaatttccctgatgatatatcctggttggccagaggttctaaagttggatatgagattgaaaaccagaggatgcagcttgagaattgcttgatccagtacttgactcatactagtaagacaatgggaatttctttggcaactaaagaggcaagtgtcacaatgcaaa

SEQ ID NO: 85517 - DNA, 248 bp, Glycine max
  Clone ID: 700953873H1
atcacattcactgtctagtgatccaccttcacttcccgtttccagtaatttaaatcacactctaatcagttctcaggattcctgtttgcatcatattcacaagttagttcaattctggttcttcattgttcatacttcatactctaactgttcaccttaaatttcctgtccaagtaacttgggtgatgtagagtttttttatttcttcaccttcctgggttttacttttcatattcctacttcatttg

SEQ ID NO: 85518 - DNA, 246 bp, Glycine max
  Clone ID: 700953874H1
tgattctgctgtggatgtagggaacaatgactatcttcccacccttttcaaggctgattaccctccttatgggagggactttgttaaccaccaacctactgggaggttttgcaatggcaaattagctactgatttcactgctgacacattgggtttcaagacctatgctccagcatatcttagcccacatgcatcagggaaaaacctccttattggagcaaactttgcttcagctgcatctggtta

SEQ ID NO: 85519 - DNA, 240 bp, Glycine max
  Clone ID: 700953875H1
ctggcacgagagcgcattgagttgtggtcaacagagagaaagtaggagagaaaagaaaaagcctcaccggcttcggcgaaatggatctgccgccggcaccgatccggtggcgcgcaaccgcaatcccattctttgtggcggttctctttgtatccaccatctccccttcgcgcgcaatctactgcgacgaagatgattgctacgatctacttggggtttctcaaagtgccaatgcttccg

SEQ ID NO: 85520 - DNA, 242 bp, Glycine max
  Clone ID: 700953876H1
ctgataacaaagttgaagaagaaaaggccttagtgctcagtgctagagaacttttttttgttttcttctttttttcttttttcatctcttacttccatgatttgttgtgggcttctcaacatcatacattgactctatcagtttcattcctgaatcaattagtttcttcactttcactttctaactgggaggatcaaagtgtgtgtctttgtcctcttggtgttgtttcttcttcttcttca

SEQ ID NO: 85521 - DNA, 233 bp, Glycine max
  Clone ID: 700953880H1
ggtggatcaggaatggacctgaggagcaaagcaaggactctcccaggaccagttagcgacccttcaaagcttcccaagtggaactatgatggttccagcacaggccaagctcctggagaagacagtgaagtgattatatacccacaagccattttcagggatccattcagaaggggcaacaatatcttggttatctgtgatacttacattccagctggagaacccattcccac

SEQ ID NO: 85522 - DNA, 252 bp, Glycine max
  Clone ID: 700953881H1
aataactcaaaatcagttctcttctgcctgcgctctttcgcttcctgcgaatctttccgagaatcgagtcacagagtagagcgaaatcggcgtagagatacaaaaatgccaaaagtaaagacaaatcgtgttaaatacccagagggctgggaattgattgagcctacactccgtgaacttcaagcaaagatgagggaagctgagaatgatccacatgatggcaaaagaaaatgtgagacattatggccaata

SEQ ID NO: 85523 - DNA, 243 bp, Glycine max
  Clone ID: 700953885H1
atttctctctcttctgctctcactctcactctctctcacttggggttgaagatgagaatttgtggagcagcaatcagcagcagctacaccaccacgtccaattcccttttagtgtttgcttcctcttccctctccagtcctgcaaaaaccaagttcctgccctcactttctagattttctgtcaagcgtccgtacttcctttcccaaacttatccgcgcattgctgtgaacaagccctccatg

SEQ ID NO: 85524 - DNA, 243 bp, Glycine max
  Clone ID: 700953886H1
gcgattcagatcttagggtttcaatttttttttctgtggagccccattggccatagccgccagccagagaagagtagaagccttcgatcctaggttttctttccccccctttctcccaaatcggacctttttcgcttctcgattcgcttccgtagccgggcgatttgaggacccagaaaagaacgaaccgaacgttttatattttttcggataatcaatcgaagatgtctcgttgcttccctt

SEQ ID NO: 85525 - DNA, 242 bp, Glycine max
  Clone ID: 700953887H1
acacggtgttcggaaagtacgagatggggaggcttctggggaagggcacgtttgccaaagtgtattacgggaagcaaataagcacgggcgagagcgtggcaatcaaagtaatcaacaaagagcaagtgagaaaagaaggaatgatggaacaaatcaaacgcgaaatttccgtgatgcgtttggtgcgacacccaaacgtggtggaaatcaaggaagtgatggccacaaagacaaaaatcttc

SEQ ID NO: 85526 - DNA, 244 bp, Glycine max
  Clone ID: 700953888H1
ggagagaacaatttgaaaacagcagtggcagtgtttgcattacatgcagtgtagccgaaggagatgagttccaaagagagttgcagaagtgaacttcgcattgcgatccgccaactcagtgatcgatgtctctactctgcttctaaatgggctgcagaacagttggtgggtattgagcaagaccctgccaagttcactccctcgaacacgagatttcagcgtgggagttcgagcattcgcagga

SEQ ID NO: 85527 - DNA, 247 bp, Glycine max
  Clone ID: 700953889H1
ctcggtgaaactcaagtacgtgaaactagggtaccaatacctggtgaaccacattctgactctcactctcatacccatgatgatcgccatcttcatggagattctacgcttaggccctgaagagatcctgaacctctggcactccctccacttggaccttgtccaaatcctctgctccgccttcctcatcatcttcatcgccaccgtctacttcatgtccaaaccccgcaccatctacctcgtcgac

SEQ ID NO: 85528 - DNA, 245 bp, Glycine max
  Clone ID: 700953890H1
caaaacaagtggaatcacaaatttctttctccatctttaatgaccaaattgacctttaggcaagattggtaaaagacaaatggactaaaatacagacacgtgtgattacgtgaagaagtggcaccccatgtccttgtctagtagaactcgtccatagaatgatcactttgttataaaaaggctttatattcttatattcatctacaccaagctacaccatttgttcaagaaactaccaagtagca

SEQ ID NO: 85529 - DNA, 243 bp, Glycine max
  Clone ID: 700953891H1
tggtggggagggagcaatggggtccaataatcatggcaactcgaaggagtttctagaactcataaagtccatcggcgagtcccgatccaaggccgatgaggagtgcatcgtcctccgcgagatcgaaaccctaaaacgccgcatcaacgacgctgacactccgaaacgcaagatcaaggagtacatcatccgcctcctctatgtcgagatgctcggcgacgacgcctccttcggatacatcca

SEQ ID NO: 85530 - DNA, 242 bp, Glycine max
  Clone ID: 700953893H1
caagaaggtgcgtcccttcctccccccttcttggttccaaaccaaaaccatcagtgcaccttcttcttcttcttcttcttcttccagtgcccgcatcatcaagagaacaacaatggaccccaacgagctgaagcgcgtgttccagatgttcgaccgcaacggcgacggaagaatgacgaagaaggagctgaacgactcgctggagaatcttggcatcttcattcctgacaaggagctcggcc

SEQ ID NO: 85531 - DNA, 238 bp, Glycine max
  Clone ID: 700953894H1
cccaattcttccccctccacccacccagcatatctctctattcctatttattagcacccctcacattaccttgtgtcaccaactactttgactcctttaccataccattacaataattatcaaacctaaccagtaaaaatggtgaccgtggaggaaatccgcaacgctcagcgttcccatggacccgccaccatcttggccttcggcaccgccacgccgtccaactgcgtctcccaag

SEQ ID NO: 85532 - DNA, 178 bp, Glycine max
  Clone ID: 700953896H1
gggttatcatttctccatttccattttctctctcacttttcaagaatcgtaagctatgggaaagtcttacccaactgtgagtgctgattaccagaaggccgttgagaaggcgaagaagaagctcagaggcttcatcgctgagaagagatgcgctcctctaatgctccgtttggcatgg

SEQ ID NO: 85533 - DNA, 264 bp, Glycine max
  Clone ID: 700953901H1
attcctaattgtttaaacctaattctcatttcttcatcgttcgattcttctcctcctaaagatgcagatcttcgtgaaaactttgaccggtaagaccatcacccttgaggtggagtcctccgacaccatcgataacgtgaaagctaagattcaagacaaggaagggatcccacctgaccagcagagacttatctttgcgggtaaacagcttgaggatggtcgaacccttgccgactacaacatccaaaaggaatccactctcca

SEQ ID NO: 85534 - DNA, 268 bp, Glycine max
  Clone ID: 700953902H1
cggaattcggttccacaacgatataactctaccgtgccctacgataaggggtttctcagagcaggagcaatgtcttccccttatctacctgccacaactgactcacttgctctcgcaactgaggccaaagacccatctgaggccatctccattctttatcgggtgcttgatgatccttcttcttcaccagatgctctgcgtatgaaagagcaagcaatcacaaacctcactaagcttctcactgatgagaataggggagaggatctgc

SEQ ID NO: 85535 - DNA, 255 bp, Glycine max
  Clone ID: 700953903H1
cgattgaatgacctcctgagtttggctgattatgttgtatgttcagaaaattttccacgggcctggacagaggcatcatctattccaagagcactagtttcaattattttaagattgccaagacttaaatttgctattgtaactttgggaaaagatggctgcataatgcttgagcgatgtgtggatgatgaaggttctcacatagaagaaatggacgttgaaagctgtttgacaacattaaaagagagaaaggac

SEQ ID NO: 85536 - DNA, 252 bp, Glycine max
  Clone ID: 700953904H1
ctcttcttctcttgcggctagggttttagcgcacttcttctagatttaaggaagatgggtaaggaaaaggttcacatcagtattgtggttattggccatgttgactctgggaagtccactaccactggccacctgatctacaagcttggaggcattgacaagcgtgttattgagagatttgagaaggaagctgctgagatgaacaagaggtctttcaagtatgcctgggtgcttgataagcttaaggctgag

SEQ ID NO: 85537 - DNA, 251 bp, Glycine max
  Clone ID: 700953905H1
tcatagaatatactttgaactcaggcacacttgtgcataatactatcatgtcatgccttcgatgttgtttggtttgattcagcaaacttgaacaaaagggcttgatggaattcacttcttcttttgatttaaccttcttctatgactatgctactccaagcaaagtagtcctatggctggcatctatcttctccggcatcatcctatgtgttcttgcttatacatcaactgctattttgagttctttgttg

SEQ ID NO: 85538 - DNA, 245 bp, Glycine max
  Clone ID: 700953906H1
gtagttgcagagagacgatggattgagaattctctctcttttctctttctcttcccaactttccttccttgggatcattctgcttctttgctatggaagactcagattcagttgctacgctgatagattcgacaacttctaagctacagcagctgcagtaggtatcagcttgaccggaaagttaccgagctgttactctgaacttgatatggaaagaactcgaggaacattttcatggtctggag

SEQ ID NO: 85539 - DNA, 244 bp, Glycine max
  Clone ID: 700953907H1
tggtaatatgacaacagatgtgacctttagtttcttatgttctgtgacagaatctaaggtcaaacctgacgatgtggaagcttggaaccctaccccctgctttgattgcattcaaaggtcatgttcacccgattggcccctcttggcacatgcttggcttgggttatcagaacaaaactgacattgagagtgtgaggaaggctgctgttattcatttcaatggccagtcaaaaccgtggttgca

SEQ ID NO: 85540 - DNA, 244 bp, Glycine max
  Clone ID: 700953908H1
agcaattgctgaaggtctcgctcagcggattgcaaatggtgatgtacctgaaaccatagagggaaaaaaggtcataaccctcgacatgggtctgcttgttgctggaactaaataccgtggtgagtttgaggagaggttgaagaaactgatggaagagatcaaacaaagtgacgagataatacttttcatcgatgaagtgcacactttgattggagcaggagcagcagaaggggcaattgatgct

SEQ ID NO: 85541 - DNA, 247 bp, Glycine max
  Clone ID: 700953910H1
gacatagcaaacgatccaaactcttttttcatttgcagcatcaaaatgagtggtagcaacgatggtagcggcagctggagctctaggtttttgaaggtggctagtgcagctgccgctacagccgccgttgccggcggtttatatgccattctttcatcctcaacctctgctagctctgagatggaagtgccgtttggcagcgcacggcgtgagagcaaagaacgtgacgatggtggctccgggtctc

SEQ ID NO: 85542 - DNA, 247 bp, Glycine max
  Clone ID: 700953911H1
gattcatcaagatttttcttgactaagattttccatccaaacattgcaaccaatggagagatttgtgtcaacacacttaaaaaggattggaatcctagccttgggttacggcatgttcttattgttgttaggtgtctattgattgaaccattcccagaatcagctctaaatgaacaggctggcaaaatgctgcttgagaattatgaggagtatgctagacatgctaggctttacactggaatccatg

SEQ ID NO: 85543 - DNA, 249 bp, Glycine max
  Clone ID: 700953912H1
agataacatgctatcagttgcaattaacagccagggtatcctgtcgagaacagatgagaagtggggagtactgaaaagtccaacttctaatgacaaaacggaaagaataccacttttgaagagggatattataatgagcgtggaagagttgcctgaaagatatgggcgtcgatgtttgggcaggggattcttgacctctcgaccagctatttttgtgattgtttcggttgctgtttgtcttggggtatg

SEQ ID NO: 85544 - DNA, 250 bp, Glycine max
  Clone ID: 700953913H1
cgacgtaagaatgtattctagtttgtcacggaatttgtaaatcaaacgaattcgttgattccatatcgattcgcatttgcgtacacccctgaccccttgatttctctcagttccgttctgcatcatagagtatggccagccacgatcttcgattcttcgagttgaacacaggcgctaagataccttccgttggtttgggaacgtggctcgctgaacctggcgttgttgctcgcgccttggccactgcaat

SEQ ID NO: 85545 - DNA, 258 bp, Glycine max
  Clone ID: 700953915H1
caccgcaaccctacacccctcctacaccccaaccccaacatcaacaacaacaattcccttatacacccctcccagaccgccctctcgaagaagaaccccaacctcaacgtcatatcccatacgatcttctccctcgccgcaccaccaccctcccctggaaccctaaccctaaccctaaccctagaattcctgatgatttcgaccgcgattatcaccacaaacaccaccgccctctcccgccgcccccgctcccgatcg

SEQ ID NO: 85546 - DNA, 271 bp, Glycine max
  Clone ID: 700953917H1
ttcggctcgatcatggcgtccgagtgtaacggtaaaagctcatggcctgagttggttggagtggaaggaacggtggcggtggctacaattgagagggagaatcctttggtggatgctaacactgtgcttaaaggatccatcgtcaccgctgattttcgatgtgatagggttcgggtttgggtcaccaaacatggaattgtttatcaggctccaagaattggataagaagtgtttacactaaagcacttcatatatatgttatgagtcatga

SEQ ID NO: 85547 - DNA, 257 bp, Glycine max
  Clone ID: 700953918H1
tatttttcgcgtcacataaacaaaaaaaataaactggggagaagcatgttgttgatgttgggactatgcttcctattgttctctgcatttccacttgcgttctctgagagatgccacccacaagacaagaaagcgttgctccaactccagaaggacctcggcaacccttatcacatcatatcctggaacgcaaaggaggattgctgcgagtggttctgctgcgttaagtgtgacgagaaaacaaaccgcgtcattag

SEQ ID NO: 85548 - DNA, 252 bp, Glycine max
  Clone ID: 700953919H1
gtttttcctctttcgcagctcaaactcaaatccccatctattctctctccgtacttgaggtcagtgtggtgctcaatcattcgatctacgctttgactggtcaggacagtagcacataatcttcttctataacatcgaccggggtcgtcctctcgaaaaatgctacctctgcgtccacaatcacaggttggagcaccaaaaacatcgctgtctcttgtttcctcagaccccctcctgtctcctgatgaacct

SEQ ID NO: 85549 - DNA, 249 bp, Glycine max
  Clone ID: 700953921H1
caaattcaagagattcccaaacttttttactttttattccctttttctcactatacaatacaaatacacattcaacaattttcgattcaagttcaaagccatcgacgagtgttgaggaagaataacaatgggaatgatagtggattttgaaaatgaccaaaacgacgccgttctggttccgccccctaacttcgccatggttgaagactgcgttttccgatccagcttccccaccccttccaatttccc

SEQ ID NO: 85550 - DNA, 246 bp, Glycine max
  Clone ID: 700953923H1
tgttagtctgaataatatctagacagagtacgggaaactattggcatttagcaacggttcacgctaatttaggaacaatttttgtttttcgaattttgttgacttgttttgtttcttttagtctgattaatttataatctagagataattcaagagattattggcatttaacaatggtttgacaccaaactaggagcagtttttgtttttctgattttgttgacttgttttgattttgtttcagtt

SEQ ID NO: 85551 - DNA, 244 bp, Glycine max
  Clone ID: 700953924H1
ggaattgttgtaactttttgattcctaaattctctaaaattcgaaattctaatttcgttaggggaaagagattgtttgtgtgtgagtgagtatggctggaaaaggcgagggtcctgctatcggaatcgatttgggaacgacgtactcttgcgtcggcgtgtggcaacacgatcgtgttgaaatcatagccaacgatcaaggtaacagaactaccccatcctacgtggctttcaccgacacagaa

SEQ ID NO: 85552 - DNA, 247 bp, Glycine max
  Clone ID: 700953925H1
aaaatagtgaatcgcacttgcaacttgccagcactactgaccacaatcactgattttggcggtgttcatgttcgacctcatcgcgaaggtggaaggctagtattggaagctgtagcttctccttctcctcgtccatattttcacatagagcgcggcgatggaaggcttaggctgtgtttgcttgagagcttttcggcctcggatagtgatgatgaagtttgtgatgctgaggaaggtgttgatacca

SEQ ID NO: 85553 - DNA, 247 bp, Glycine max
  Clone ID: 700953927H1
atcgcgaggtggttgagagacgcgtttttacagttacgggcacaagagctgatgaggagacaattgacagattaattgaaactggagatagtgaacaaattttccagaaggctattcaggaacaaggacgaggccagataatggacaccttggctgaaatacaagagcgacatgaagcagttagagatgttgagagaaaacttcttgatttacaacagatatttctggatattgcggtgttagtcga

SEQ ID NO: 85554 - DNA, 249 bp, Glycine max
  Clone ID: 700953928H1
ctcaaaaaaggcaaagcttattcccccaagacttagctagcactagcaaacacctctatatctaaaatggtttcaatttctgatcatgaactggttttgatctttggtctcctaggtaacattgtgtcattcatggtgttcttagcacccttgccaaccttctatacaatttacaagaagaaatcatcagaaggatttcaatcaattccatatgcggttgcacttcttagcgcactgttgcttctatat

SEQ ID NO: 85555 - DNA, 258 bp, Glycine max
  Clone ID: 700953932H1
caaacacatacattgtagtatcacttttgtctcggaatttgttctttttagttcatactagcttaaaggtatcatgtgtggttttgatgtgcatggctgtgatgagtgcaccaatgatggtgcaagccgtgtcatgcaatgatgtttctgtgaacctagcaccgtgcctatcttacctgatgcagggtggagatgttccagaatcgtgctgtagcggagtgaggaacattctgggttctgccagcaccacctttgaca

SEQ ID NO: 85556 - DNA, 261 bp, Glycine max
  Clone ID: 700953933H1
ataaaaacgtgattagctcacagtcgtttcggggcattcttgtgcactcagttactctctctctctctggagcgtcgtcgtttcgttagggcacaaaaccccttttcggatcggtggagcaaggcctcgccggcgagattcccgaggctgttcaatcagcgatcgagcaccggcgaaaagcggcgaagatgaaggttttcgtgaagactctcaagggcacgcacttcgaaattgaagtgaacccttcggacacgctttctg

SEQ ID NO: 85557 - DNA, 258 bp, Glycine max
  Clone ID: 700953934H1
ctagcagaaacaattagagggtttaaattgattctttctggagaattagatggtcttcctgaacaagccttttatttggtaggtaatatcgatgaagctactgcgaaagctacgaacttagaaatggagagcaatttgaagaaatgactttaaatctttgtgtactgacccccaatcgaattgtttgggattcggaagtgaaggaaatcattttatctactaatagcggacaaattggagtattaccaaatcatgcgc

SEQ ID NO: 85558 - DNA, 253 bp, Glycine max
  Clone ID: 700953935H1
gctaattagatttctgagagaaaggaaagggtgtgagaagagaatggagagtaaagaggaagatgttaacgttggagcaaacaagttctcagaaaggcaaccaattggtacagcagctcagggtggtggtgacaaggactacaaggaggcacccccagctcctttgtttgaacctggtgagctcaaatcatggtccttctacagagctggaattgctgagtttgtggcaatttcttgttcctctacattacca

SEQ ID NO: 85559 - DNA, 252 bp, Glycine max
  Clone ID: 700953936H1
ctcagatctttcaagttcaaggccatgaacatgatgttcccatttcgcacccacccattcacaatcgctggtttccagagggttgctgtccattaatcaaccttcccttcaaacatcacgacgattttataaacagatatgatacaccgttgctgagagagagaatcttccacttctcagcagagtctattgcaaaactgaaagcaaaggctaactcggagtgcaacacaaccaaaatctcatcgttccaat

SEQ ID NO: 85560 - DNA, 250 bp, Glycine max
  Clone ID: 700953937H1
ttttcggatactccaccaccttgatccaaaactcgaagatcttggtgaggaagcccatggcaaatcagcagaacatagtggtggcagatggcacagggcagaagaacatgcccacaggaatagtcctccataactgcgagatcatgccggaccctaccctcttggcagaccgcttgagcgtgaagacttacttggccaggccatggaaggcattctcaagggcagtgttcatcgagaatgttatcgggga

SEQ ID NO: 85561 - DNA, 246 bp, Glycine max
  Clone ID: 700953939H1
atcaaatctgttctgcccatagccgaatcaaatggatttcaattggcaaaacccttccccgagtggcaatgccgtggtctaccagtgtttgaaggctctgaatgcctggttcggacagatcctgctaaacacggcgagggtttcttcatcgctttgtttactaggaaagatgctaacttttcagggggctcaaataaaaatgaaactagaatttcccacagcactcccgaaattaaaaacgcgcga

SEQ ID NO: 85562 - DNA, 247 bp, Glycine max
  Clone ID: 700953941H1
attctcttcacaatcccgtgatcccatttcgttccgttcacttcaatctcaatggccgataataagcaacccaatcacgaggaggcaagtcctcttctccaccagtcccaacccaaatccgaaccaccaacgccacctgagactcccgagtttcttctcggatggaccgctgatgggctcccgctgggccacggcagcgtcgtgggccagcccatgggccgcgccccttggaactcctccatctgcg

SEQ ID NO: 85563 - DNA, 247 bp, Glycine max
  Clone ID: 700953942H1
gtttgatcctggctcagaaggaacgctagctatatgcttaacacatgcaagtcgaacgttgttttcggggagctgggcagaaggaaaagaggctcctagcgtgaaggttgcttgtctcgcccaggaggtgggaacagttgaaaacaaagtggcgaacgggtgcgtaatgcgtgggaatctgccgaacagttcgggccaaatcctgaagaaagctaaaaagcgctgtttgatgagcctgcgtagtatt

SEQ ID NO: 85564 - DNA, 246 bp, Glycine max
  Clone ID: 700953943H1
agcatttttcagagtagaaccttcactctgctatcccccatattcctgtgtttcctttgaaaaaaaaagaagaagaaaaaacatgtctaggttttttggattcttctttgtgggtcttacgttgatgttggtcggtgtggcaaatgctatggctaactcttccaacaaatttgatcaactcttccaaccaagttgggcttttgaccactttattcatgaaagggatcatctcaaactcacacttga

SEQ ID NO: 85565 - DNA, 249 bp, Glycine max
  Clone ID: 700953945H1
cgaaaaatgtcgaagctgatcttcgtgttcctttcgcttattcctcttctctgcacctccttctccccagagagaccctcagatcgacgcgtcctcgttttgctcgatgacttcgccatcaaatcctctcattctctcttcttcaactccctcaaatctcgcggcttcgatctccaattccacctcgcagacgacccccaaattgcgctccagagatacggccagtacctctacgacgccctaattctc

SEQ ID NO: 85566 - DNA, 255 bp, Glycine max
  Clone ID: 700953947H1
ttccttttcatcattctcatatcctcaatcaccccccctcgcactcgctcttcccttcctctggtggcgacaatgtcgactcctgctaggaagaggctgatgagagacttcaagaggctgcaacaagacccgcctgcagggatcagtggtgccccccaggataacaacataatgctgtggaatgctgtcatatttggtcctgatgatactccatgggatggaggcacgttcaagttgacactccaatttactgag

SEQ ID NO: 85567 - DNA, 269 bp, Glycine max
  Clone ID: 700953948H1
cttcggctcgagctcaactcaaaactcaaattatttggtttctgctctgtaaattccctctgctgcttaacaacatccatcttctccaaaacaaaaacaaagaaatatctaaaatctggaacttacgctgatccataatttgttgcttttcttccttcgtacaatgtcagaactttagcatcacctttttgcctttccttcttactaactcagataactaccgccaccatgacttcaaaatctagacccaatctatctgaaaattccaa

SEQ ID NO: 85568 - DNA, 258 bp, Glycine max
  Clone ID: 700953949H1
caagaggttagggtttcaccgcgaagaagaagagagagcagaagcagcaatggaagcatacggtggtttcatgattgacgagacagccgttagggttgagaacgctttccttgatttcctcaaaagcttcaagtccagtagccatcggaacgaactttattacgaagcggagatcgaattgatgacgagcaatgactccaacaccatgttcgtcgatttcgaccacgtcatcagattcagcgacctcctccagcaaac

SEQ ID NO: 85569 - DNA, 254 bp, Glycine max
  Clone ID: 700953950H1
cttgaagttcagcatcctgctgccaaggttttggttttggctgggcaggctcaacaagaggagattggggatggagctaatttaactatttcatttgctggggaactcctgcagggtgctgaggaacttatcaggatgggtttgcatccgagcgagatcatcagtggatacactaaagcgatcaacaagactgttcaaatattggatgaactggttgagaatggttcagagagtatggatgttcgtgataagga

SEQ ID NO: 85570 - DNA, 252 bp, Glycine max
  Clone ID: 700953951H1
ttcgggtgttctgcgtttttgcgaatccgatttggcctcaatttcgccattcctttttggattcgtcttttttttttcttcttcttctttttcatggaccgcagagtctatcaccatcgtcctgctcctccggcacatgcttctccccctgaatactttgtcctccaggggaacacaacttataaagacgatctatatttaaggaagaggacagggatgcgtcggtggctttgttgcacatgtcaggtggaa

SEQ ID NO: 85571 - DNA, 249 bp, Glycine max
  Clone ID: 700953952H1
ctttttcaaaaacaactcagcctaccacgatgtacaccaccagctactatggcaacaagtacaacttctcgcagccattcttcgttatgtgggacaaaatcttaggtacctacatgccttacacgttggaggagagggaaggtggtggttttgaaactagaccttgcaaagattacaaggatgattaacttttttgcttgacgagcattctttatctgtactagtattgttttccctttttatgagcag

SEQ ID NO: 85572 - DNA, 246 bp, Glycine max
  Clone ID: 700953954H1
aaggcatcgtgtgcttagcaatactgtgatagcagaggccccatcttctgcaaataaggaaagttcagaatgtaataattttaattttcaaccacttcctgaacctaatgttgttgagaagatttacacaacaaattgctctgatgagaagccccagttatcttcctttgaaagctcacaaatagaagaaacaaatgtcattgaaactgaggagaaggtggatgtgaatccaccagagtctgaggt

SEQ ID NO: 85573 - DNA, 246 bp, Glycine max
  Clone ID: 700953955H1
tggcacattcttaatttctcatgatacccccgaagaaaaaaaaactgacccttttcagttttctcttatctctctgtctttccttccattgagacagacacatttgtactagtttcatttttggagctttaagccattgtgcatctcttctcatttgtgtccactgtaagagggtgttgtgttgggttaccctctctctccatctgcattgtttgtggctgtcagtgttatcatacaaggtgttgt

SEQ ID NO: 85574 - DNA, 244 bp, Glycine max
  Clone ID: 700953956H1
gtgggctagtccagtcgtctcaattctcttcaggtaattctgctggacaatcactgcaaggaatgcaagcaatgggtatgatggggtcgccaaatctcacctcgcaactacgagcaaatggagccatggcttatgcacagcagctgcgtatgagtcagggtcaaatcaggcagcaactatcccagcaaggttcacttaacactgcacaggttcaaggtttaccaaggtcatcatcccttgcttt

SEQ ID NO: 85575 - DNA, 249 bp, Glycine max
  Clone ID: 700953959H1
gagttcaaacaaggtttttcacagcacatcgatacgaggatgttgcggctgtcgattcaacgagtgaggaagttgaactttctcagtccccagatctctgctttgggaaggtcccatttgtcaactgctgctgaaccatcttccagtaagagcaatccaccgagggttccaaatcttattggaggcagttttgttgactcaaaagcatcaactgtcattgatgttataaacccagcaacccaagaagtt

SEQ ID NO: 85576 - DNA, 249 bp, Glycine max
  Clone ID: 700953960H1
cgaaaatggagcattgtaactgctacatgttcacgctgagccttcttcttcttcttcttcttactccgccttctctctccgacgatctcggattcgattttccggcgaagaagctgataagagaccttaacctttttccttctgaagatgtcaacatcgttcctcgccactccaattctcacgccaacaaaatcgtcgagaaaccgcttaggttcccaaacttagtgccttcagactccggcatttccc

SEQ ID NO: 85577 - DNA, 254 bp, Glycine max
  Clone ID: 700953962H1
ctagaggagcgtgaatttgacgacttgagtggccatgacattataagccactccagaagctcccaccctccaacccccattgtccacaagcacactaaatccaatcacaacaaccacaagaaaaagagatcagattccgaggaagatggctccgtctcttgcaacaagtgcagacctcactcccgcgacaaaatcttcatccttcccttggatcactcctccaccaacaactctcacaaaccctcttccttact

SEQ ID NO: 85578 - DNA, 282 bp, Glycine max
  Clone ID: 700953964H1
acgtctcctcggacttctgctcgagccaatatagcccaagccctatacaagcaaaccctaacacacacccatttgattcagtagccatggctagcctcaaggttgcatttttggctgcagtgctctgcatggttgtggtgagtgcacccatggcacatgcagctatcacgtgcgggcaggtgacgaatagcctgatcaattgcatcggttacctccagaacggaggaacgccgccgtcgggatgctgcaacggagtgaagagcctcaatgccgccgccaaga

SEQ ID NO: 85579 - DNA, 84 bp, Glycine max
  Clone ID: 700953965H1
aagaaactccatagcgacagagacaattcacgttatattgttagtttattcgtcacatcttgctgtgagtagtcatggcaagcc

SEQ ID NO: 85580 - DNA, 252 bp, Glycine max
  Clone ID: 700953966H1
atttggtttgtttgaggtcttgtatgtggctgcagatatccaaaccttaaattcggtcctcgaatctttctgatcattggttgttttttattctttcaaatacattccaaaatctcttggaaattgcgagattcactgcttatcctagcagcagattttgggttctgacccaattattcattttccccaactgggtcttgtggattttttgttggggttttaaatttcgtgttgctgggtttgaaagttatt

SEQ ID NO: 85581 - DNA, 247 bp, Glycine max
  Clone ID: 700953968H1
ctaaatctaatcaattgatctcattttccaaattttctgtctctgacattaacaataagtggctctcaaaaaagagaagatattttggtggaaaaacactcaatcaacacacatgattgaagtgcaagcaaatgccatggagcagagttggtgggccaatatgcctcacgagcttctcagagaggtcctcctccgaattgaatcgtcggagtccacgtggccgctgcggaggagcgtcgtggcttgt

SEQ ID NO: 85582 - DNA, 244 bp, Glycine max
  Clone ID: 700953970H1
acacaaactcagggtagggcagagagagagagagagagagagagagagagagagaatgggagggtgggctatcgcggtgcatggtggcgctggtgtcgaccctaatctcacactcgagcgccaagaagaagcgaaacaacttctcacgcgctgtctcaatcttggaatctctgctctaaattctaatcttcccgacatagatgtcgtcgaacttgtggtgagggaattggaaacggatccgctg

SEQ ID NO: 85583 - DNA, 243 bp, Glycine max
  Clone ID: 700953971H1
ctttggttcagggggaaagatcccagttttcagtgacccttctaatctttttatcttctcttctctgtccctcactccttcctttttcctctctcacacatataaatatatagcttctggatcttcttccacctcttaacggatctcagattccaaaatctatctcctttaggctctccaaatttttacttcagttcttaatctcctgaaattctgttttttttttgtgtgtatgtgtgtgtg

SEQ ID NO: 85584 - DNA, 244 bp, Glycine max
  Clone ID: 700953973H1
ttttgaaagaaaaagaattaggaaatgatgttccgaaagagagacaaggaattctcaaagccattgtgaatttcttatgggaggaaggaaagtcttcctatgaacctgtttggccgaacatgaaatttggttggagaattatagtaggatcaatcattggatttttgggagcagcattgggcagcgttaggaggggtaggaggtggaggaatttttgtgcctatgctggctttgatcattggct

SEQ ID NO: 85585 - DNA, 245 bp, Glycine max
  Clone ID: 700953974H1
gtgccttatcgctgtggttatcatcttcttcttcctctttcttagatctcttctttctctacgccgcacgccgaaaccatggccggaaaaggagagggtcctgctatcggaatcgatctcggaaccacctactcttgcgtcggtgtgtggcaacatgaccgcgttgaaatcatcgccaacgaccaagggaacagaaccacgccgtcttacgtcggattcactgacaccgagcgtctcatcggtga

SEQ ID NO: 85586 - DNA, 243 bp, Glycine max
  Clone ID: 700953975H1
tgcaaactttgacagggaacggatccccgaacgtgttgtccacgctcgtggagctagcgcaaagggtttctttgaagtcacgcatgacatttctcacctcacatgtgccgatttccttcgagcccctggagttcagacccccctcatcgtccgtttctccactgttatccacgagcgtggcagccccgaaaccctcagggatcccagaggttttgctgtcaaattctacaccagagagggtaa

SEQ ID NO: 85587 - DNA, 248 bp, Glycine max
  Clone ID: 700953977H1
ctcgagccgattcggctcgagattctgtatctggagggagccatgagtgcacttgcagcatactccgctactccttccgccacccaaaccctctccctcttccgctccctcctccgcgccgcgcggagtttcccgattacaacatcagggagtacaccaaactacgcaccgccgatgcgtttcgccacaacgccactctctccgacccaaattcaatttccaccgccttcgcccacggcaagtcacag

SEQ ID NO: 85588 - DNA, 253 bp, Glycine max
  Clone ID: 700953980H1
cagaaagcttatgcagccttgcctagcagtgtacaacagagacttggaacatacttctacaagggtataatgtatggtgctgttggatttgcatgtggtattataggccaaggcattgcaaatatgatcatgactgcaaagcggagcataaagaaatcagaagaggacatacctgtgccacctcttgtgaagagtgctgctctttggggcgtctttctagccgtttcttccaacacgcgataccaagtcgtca

SEQ ID NO: 85589 - DNA, 256 bp, Glycine max
  Clone ID: 700953981H1
agcaactatgagtctacaaaaagctaagataaagaaacttggttttatcttctttgttattattatattcacttcttcaatatcttggttctttgatattattattcgattgagcaaaaaatgggagttccagagagagaccctcttgcacaattgagcttgcctcctggatttagattttatcccactgatgaggagcttttggttcagtacctttgccgcaaggttgctggccatcatttctctcttccaatca

SEQ ID NO: 85590 - DNA, 251 bp, Glycine max
  Clone ID: 700953982H1
gcccaaacaaacatctctgtacctctctccctctttccctctctttcgcttatcaattttcgttttaatttctctacgactcgggtcgacctccgatcactttgggtctatcggcggggacttgggtcgaactcgcatgactcaatttactgcgaggtacggaatccgtgaattttcctgcgaggtaagattccgttgaaattttgctttggtccgagggggagggtggaattaggatcgatttggcttca

SEQ ID NO: 85591 - DNA, 250 bp, Glycine max
  Clone ID: 700953983H1
gccaaatccgagagccatgtccgtggttgatatgttgaattgagaagttagtagggttccttcattcgactcaaacacacaatgagtttgtctctcattcaaggttattcttccgccgaagacgaagaccaaccccaaccccacgattccgacctcgaagattccgacgatgaagccgccgccgccgcctcctggaccgccgccgcaaaccacccttctctgggcgacagatccatcttcgaccacgttc

SEQ ID NO: 85592 - DNA, 246 bp, Glycine max
  Clone ID: 700953984H1
tgcattcaatggggaaaacccaaggcctggagtcatcattaacaaaccagatggaggtgatgtttataaaggagttccaaaggattacaccggcgaagatgttactgttgataacttttttgctgctttacttggaaataagtcagcactgactggtggcagtgggaaggttgtggacagtggtcctgatgatcatatatttgtatactatactgaccatggaggtcctggggtgctcgggatgcc

SEQ ID NO: 85593 - DNA, 244 bp, Glycine max
  Clone ID: 700953986H1
ttttacttcccctatggctcgtcactccttgctcttagccctcctcctcttcgccgccgtggccaccgccgcgatggcggtggccgcgtccgacgccgacgacatcctgatccgtcaggtggtgccagatgttggcgaagccgaagaggaggacaacctgctgaacgccgagcaccacttcgcgagcttcaaggccaagttcgccaagacctacgccaccaaggaggagcacgatcatcgcttc

SEQ ID NO: 85594 - DNA, 241 bp, Glycine max
  Clone ID: 700953989H1
ttccattctctctgtgtatttccctacctctcccttcaagatgcagatcttcgtcaagaccctcaccggcaagaccatcacccttgaggtggaaagctctgacaccatcgacaacgtcaaggccaagatccaggacaaggaaggaatccccccggaccagcaacgtctcattttcgccggaaagcaacttgaggacggccgtacccttgctgactacaacattcagaaggagagtactctt

SEQ ID NO: 85595 - DNA, 243 bp, Glycine max
  Clone ID: 700953990H1
tccaagcaaaacttttcaaacccaaaaaaaatccaaaaaaagaaaaacaaaacgcttaacgcaatacaaaaaccacagtttcaatcacatctctctctctctttctcgcaaatttctactttctgggttttctatttgagattcgttgttccaatgagcgatcacttggtggtgttcgttgaccgtctcgcgcgccctgtccccgttgacccggtggcgcagcgccttccgagccgtctcctc

SEQ ID NO: 85596 - DNA, 244 bp, Glycine max
  Clone ID: 700953991H1
attcattcttcttcttcttctggtgctaagtgcctaagctcaaatggcgtcgtttttgtcttttctccctgccgtttccgctcgtcccattcccaccagcgccttctctcccaaaagacctctctttcaaactccacccaccttgcatttcaaaaatcaccggtttgcagttagttgcagttatgcagaagcaggtgtctatgctaattctagctctaacaccatagatgttgtggctgatgtt

SEQ ID NO: 85597 - DNA, 248 bp, Glycine max
  Clone ID: 700953993H1
ctgcaattcagcgggctcaagtgctccccactctcatcttcttctctcttctccaaaccttctctttggacccaacaatcccaaaagcgcgtttcaattaccattgcgaactcaatagcaatagccaatgcgcagaacaaagagagagcgaggcttaagaaactcttcgaagaagcctacgagagatgccgcaatgctccaatggaaggtgtttccttcaccatcgaagacttcactgctgctcttga

SEQ ID NO: 85598 - DNA, 252 bp, Glycine max
  Clone ID: 700953994H1
ctttgcacctcagcacagtttcccatcgaaaactagcccatctttttccctcgtaccttttgcttcagcaacaacaacatcgtcgtcacaaatctagagatagatagatagatagagagaaacggttgaattgaagatgaaaatcactgtcatgactgctgatgaacaaatcatcacgttagatgtggatccccacgaatctgtggaaaacgtcaaagcattgctcgaggttgagacaagtgtgcctcttca

SEQ ID NO: 85599 - DNA, 251 bp, Glycine max
  Clone ID: 700953995H1
cccatttgtttggcttctcttctgtcattattcttgaatctttgctaggccaagaccagaatatagaaaaaaagccataaaatggcacaagaaaaggcacttcgtgttaggtacctagtggcattccttcttgtgttcttcactatggcctcatgtggctcaggtgttggagtcaactggggaaccatggcaactcacaagcttccaccaaataaggtggtcaagatgcttcaagaaaacggttttgataa

SEQ ID NO: 85600 - DNA, 275 bp, Glycine max
  Clone ID: 700954001H1
agcagccactatagtaaacaatcttctctatctaaaatggagtttgttctaaactacctaaatgccactgccattggagttctttctctaaccctcttctttttgtttttgtataatcccttcaaatttgcattaggtaaaaaagaggctcccgaagttgcaggtgcatggccaatacttggtcacctaccactattgagtggttcagagacacctgatagggttttgggtgctttggctgataagtatggacccatattcaccatcaacaatgg

SEQ ID NO: 85601 - DNA, 269 bp, Glycine max
  Clone ID: 700954002H1
atccacacacaacacacacctctgcctctactccgcacaactcctcacagacaagacacaacacacgctcatgttgttgatgagtggaggcaacaaaaaacatatatccatcactcacaagaccaattgacctttgttcttggtacaattcgattcaaatttgtcgcactaaggagagccgctcaaggctctgggatgtactatacgccgttcggggttctgattttcggcggcgagaaggttcaagagacacagtgggagaaggagcg

SEQ ID NO: 85602 - DNA, 232 bp, Glycine max
  Clone ID: 700954003H1
cttctcttccctttgaccattcaaccttcctcgcctttgcctccgtttcgtgagtccactcttcttcgattctagcgtgactgagatggctggaggtgttattcagcagatattgaggaggaaactccaccctcggtttactaactctcccttgttgtcacccatcgtagcaaaaaaagatgatgctggctctactggcagtcagtccttaagagcacttgcattaattgga

SEQ ID NO: 85603 - DNA, 262 bp, Glycine max
  Clone ID: 700954005H1
acagaaacaaaagtggcagtattaggtggcatcaccgaagtgcagggagctgccaacagcgtcgagatcaacaatctcgctcgctttgctgtagaggaacaaaacaaaagagagaattcagttctggagtttgtgagggtgattagtgcaaagcagcaagtggttgctggagtgaattactacataacattggaagcaaaagatggtgagattaaaaatgagtataaagcgaaggtttgggagagggaatcccaagagttgc

SEQ ID NO: 85604 - DNA, 243 bp, Glycine max
  Clone ID: 700954007H1
ctcaaatccaaatccaattccaattccaattcccaatcttctcaaaccctaattcctcatcttgaaaatgagagaaatcttgcacatccagggagggcaatgcgggaaccagatcggagcgaagttctgggaggtgatatgcgacgagcacggcatcgaccacaccggaaagtacagtggcgactcctgacttccaattggaacgcatcaatgtttattacaacgaagcgagtggcggaaggt

SEQ ID NO: 85605 - DNA, 258 bp, Glycine max
  Clone ID: 700954008H1
caaagaagccccttctcactcagttcacgtttctcactttttgtgtgcctgcagcagcatttacttattaaatgctgaacctccaagagggtggttctccttctggaccaagttggaatttctagctacttgttgccacaaaatgattggtctcattttcatgggggggggttgagatctgagtctttagtctttttcactgaaaaagatctataaagttggtgtcttgagtccttgttcgtatgtctgtgtatataa

SEQ ID NO: 85606 - DNA, 260 bp, Glycine max
  Clone ID: 700954009H1
gaatctgcaagcaccatagatttgtccgagaaaaaatgtgaaggggttgagtcggagctcgagggccttttcaagctaaggattgaagctgaggttgaatacctagccatctcaaaggtaatgcagaacatgaagggtggggcaggtatccaacagacattattggaagaacaagagaaactgtctgaaaatcaagcgcagattctcgacaaagttgtagatgcagagagtaaggcttcagtgctgaagaacaaaacaga

SEQ ID NO: 85607 - DNA, 255 bp, Glycine max
  Clone ID: 700954010H1
ctcgagccgaatcggctcgaggtaaccgtttagattttacactacattaataatacttaaatacttaatatacacacacgagagggacaacgcggagagattcagaaacagaacgactcggtatttctcttcctctaaagaccgagtccgactcggagggcgaagaaggcaaactcagtaacctttccttccttcactacacgcgagagagacctcagtgtctgagacgcaggcaacgtgcattttcccatacga

SEQ ID NO: 85608 - DNA, 253 bp, Glycine max
  Clone ID: 700954012H1
agccaagtgaaagtgagaaaaaataaaaatcaaagagcataatgtcagggatcattcacaagattggggagacccttcatgtgggagggcacaagaaggaggaggagcataagggtgagcaccatgctggagaatacaaaggggagcaccatggtgaacacagtagtgagtacaaaggagagcatcatggtgaacacaaagctggagagtaccatggtgagcacaagccagagcacaaagaggggttcctaga

SEQ ID NO: 85609 - DNA, 254 bp, Glycine max
  Clone ID: 700954014H1
tggaaaacaaagtgtgcctattgatctaaaggagtccatccgagtccttgctaaacttagagaagcaccttggtattatgcagaaactaaagaacttccgagatcatcacatgaagtaaaagatggacactggcattccatctcaaagggtgctccttggtttccttatgaaggtaaagaaataagccgtttatcttttgaatcgcgagaaaccatcaaatccacaccaaagctaaaagagcttcctagacttt

SEQ ID NO: 85610 - DNA, 253 bp, Glycine max
  Clone ID: 700954015H1
gtaaacgtgcatgcaggccacaagggtaagccagtgcatgtatcagttggctcaaagtctccatttgattacgtctacgccgccacggaaactcaattacacgatgaccccaacgtggcactcttcttcttggaaaaggacttgcattctggaacaaagttggacttgcacttcaccaggagtacatctaatcaagccacgttcttgtcacgccaagttgcggattcgatacccttttcatccaacaaggtgg

SEQ ID NO: 85611 - DNA, 256 bp, Glycine max
  Clone ID: 700954016H1
gacatggcgaaatcggcgtcgaattctctgatgcagagcctgaagcggttcataaagaagccatgggagatcacgggcccgtgcgcggaccctgagtacaaatccgcattgcccttggccgtggagtaccgcctcagctgccccgccaccgtccaggagaagcccatcatccccaactccctcccggagaccgtctacgacatcaagtacttcacccgcgaccagcgccgcaaccgccctcccatacgacgcaccg

SEQ ID NO: 85612 - DNA, 270 bp, Glycine max
  Clone ID: 700954017H1
cccgatgatagctcagcactgaagccacccaatgtatatggaagcattgagttgaaaaatattgatttttgttatccttctcgaccagaagtgttggtgttaagcaattttagtctcaaagtcaatggaggacaaacaattgctgtagtgggagtttcgggatcagggaagagcacaataatatctttgattgagagattctatgatccagttgctggccaagttttgctagatgggagggatttgaaacaatataatttaagatggttg

SEQ ID NO: 85613 - DNA, 264 bp, Glycine max
  Clone ID: 700954018H1
catcagttcctccaagtccacgttaacctcaacgagaattccgttgttcctagcgatgaactcgttcgccaaatcagaacccgtgtcatcctcagcctcttcatcatcatcaacgtaccagcaggtgccggagcaagatgctaataacgacttggaccgcgtacagacaacacgtttcgcaggtacacgtccaacgttaccaaggggagtggcaaaggaacagccattgtctggttcaggaacgatctcagagttttggataac

SEQ ID NO: 85614 - DNA, 259 bp, Glycine max
  Clone ID: 700954019H1
cggcgaacgaaacgctgtcgttgcgccaatcgcggcgttgttgttggtggtgctactcgcggcgagtgtggtggtggaggctcaggagaactcggacgtgaagacgctggtgaagcacatgcacgggaagaagtactgcgacaaaggatgggaatgtaagggctggtcaatttactgttgtaacctcactattactgattatttccagacctaccagttcgagaatctcttctccaagcggaactcgccggtggcgcac

SEQ ID NO: 85615 - DNA, 259 bp, Glycine max
  Clone ID: 700954020H1
cagttccatataccctctctctagcttccttcactcacttaattgtgcaatcccaattcaaatcccatcagaatgatgaaatttcaagcatgttcaaaccccatctcaaacttgttctatgcgtgttgtgtccttcttttaccaccaaccatggccttaggagattgcacctgtgacacaaaagaggccacaaagagtgactcaattgaagtcctccactacaaaattggctcaattgcttctgtgcttgttgctgggg

SEQ ID NO: 85616 - DNA, 249 bp, Glycine max
  Clone ID: 700954021H1
tagagctatagttatattgatattgctatttgttaagctcttatttcctcggccatggctaataatgaacgtgatctcttctcggcggagattgtgaatcgtggaattgaaccgtcgggacccaacgctggctcgttgacattctctgtgagggtgaggaggcgcttaccggattttctgcaatcggtgaaccttaagtacgtgaaattgggttaccattatctcataaaccatggcatatacttgttc

SEQ ID NO: 85617 - DNA, 252 bp, Glycine max
  Clone ID: 700954022H1
cgttcactctccaaaaaggagagtgagcctttgaagatataacacagaaaaaaagaaccagctaatagggaactgcatcgacactatagcagaagatgacatatatacacaagatgggaccattaccatctccaaaaaacctgccaacaagaaaaagactggaaattggaaagcttgctatttaatcctggaaatgaatgttctgagagattggcatactatggtatgagtacaaacctggtgaactatctt

SEQ ID NO: 85618 - DNA, 257 bp, Glycine max
  Clone ID: 700954023H1
tctaattacagtagccgatcacaacaattagttggccctcaaaaagctggttctaataaggagtggaaaccaaagccaacaaatacgattaatcagggttctggaccagctagtgcatctgaggttcttgtttcagttgactcaactgggcagttacaatctgcatctagtgctcttaactctgaagaagctacttcaaactgcagagggactgggaggattttcatcttccacagcgtcaacatgttatacttcca

SEQ ID NO: 85619 - DNA, 255 bp, Glycine max
  Clone ID: 700953402H1
ctagcctccgtgatgatttgatcttcaaaattcttgattctgaggggaatgaaatatcacgtacaggtgttcaaataaaattgatattggagaaaggtgttttggaagacaactttccccttggaggtggccatctgcgtttgaagttgcaattcatccttagtgatgaagagcgcgacagaattcgttcattgagacaatctgcattaaagaaaaaacatgatgagcttcttagttccagtagaagaggtgaag

SEQ ID NO: 85620 - DNA, 260 bp, Glycine max
  Clone ID: 700953403H1
ccaaaaaccagtctccgctgaagaagtggtcgctgttcctgcggagaacccaccatctgaagccgaagctgaaaacatcgaagcagagaaggcccagagtggtgtagaagacaagatttcccagtcggtttcgttcaaggagagaccaacgtggttggcgacctccccgaggcgcagaagaaagcccttgatgagctcaagaagcttggtcaagaagcgctcaacaaccatgagctaactgctcccaagccagaaccgga

SEQ ID NO: 85621 - DNA, 259 bp, Glycine max
  Clone ID: 700953404H1
gaaggtcttgatgatgcagatgatgatggtgaggaagaatatgaaaatgacttagaagtgacagaagaagctgagcctgttctccagaagcctcctgaacaaccagtggttacaaaagaagctgaaaggcaactttcaaagaaggaattaaagaaaaaggggcttgaagaacttgaagctgttttggctgagctaggatacacacgagaggaacccactggtcaagaagatgattccaatggtgctgagaagaaagaag

SEQ ID NO: 85622 - DNA, 255 bp, Glycine max
  Clone ID: 700953406H1
ctggagtatataaaacatgatgacttaatattaagaatttttcaacgtgtcgaaaaacaaactctacaaaagatcctgaccgatgatgggactcccaatgtagctgcaataagtgggctgtatcatgaaattagtcaacgtggggcaaggacttgttagcttctgaagtgaaagagttgttatttggaacaaaattaaatgacacaaatatcaaagaggaacagatagcagacatgttaaaagtttttgaccgaa

SEQ ID NO: 85623 - DNA, 258 bp, Glycine max
  Clone ID: 700953407H1
tgacaaagctagtagctgaagttcttgagaggaacaaattacctggtgcaatattcacctctttctgtggaggtgctgacattggtcaggcaatagcaaaagacactcgcattcccctggtttcatttactggaagttcaaggttggcttgatggtccagcaaacagttaatgagagatttggcaaatgcttgcttgagttaagtggtaacaatgcaataattgtcatggatgatgcagacatcaaattggctgtacg

SEQ ID NO: 85624 - DNA, 257 bp, Glycine max
  Clone ID: 700953408H1
tgactcgagccgaatcggctcgacttcggctgtctcatcactaccaacttatatttcaaggggaccaagttatggctcccgatgcaaagttctcctagcttttgaagataacgggtcttcaaaaattggggttaggtttgataatcaattccagatggaaatgatcttggtggcctttgcgaagatgaccatgggttcttctgttctgcaaatcatttactacaagtagacggctctggaggggatgatcttgacaa

SEQ ID NO: 85625 - DNA, 251 bp, Glycine max
  Clone ID: 700953409H1
atcggccagcaccaacagcatcggcggcgacagtcactctccgacaacaacacttccgcggcgaaaaatgtctctggtggcgaacgaggatttccagcacattctgcgtgtgctgaacaccaacgtggatgggaagcagagataatgttcgctatgacctccatcaagggtattggaaggagattcgccaacatcgcttgcaagaaggccgatgttgacatgaacaaaagggctggtgagttgagtgctgc

SEQ ID NO: 85626 - DNA, 255 bp, Glycine max
  Clone ID: 700953410H1
tcgtcctctaacactcttccaaatcatggctagctcactgcttgtgagggttgccagctgcatggttgtggtgtggatgtttagttttgggcacataattcccttggcagaagctgaaattccatgtggcagggtgcaatcactgtggctccatgcatagggtacctaaggggtcctggtggaggtgtccctgcaccatgctgcaatggggttaagagcataaacaaccaagccaaaaccaccccagatcgtcaa

SEQ ID NO: 85627 - DNA, 232 bp, Glycine max
  Clone ID: 700953412H1
aaaacctttgctttcgccccatcttctccgccgttaccggtaatcgccgccgccaagctcgccggaatctctccctcgattgatacctctctctctcctgactcacctcccgcatttatcttctccgatgggctcaattgcatggagcatatgctcttctacgttatatcggccgagttgccagccttcccaatttctatgggcaaaatgcattagaatctagccagatgga

SEQ ID NO: 85628 - DNA, 250 bp, Glycine max
  Clone ID: 700953414H1
atacgctatgtattttcagacaagacaggaacactaacagaaaacaaaatggaattccagagggctagtgtgcatgggaagaattacgggagctccttgcctatggttgataatacagcagcggaagatgttattcctaaacggaaatggaagctcaaatctgaaattgcagttgattctgaactgatgacattgttgcagaaagactcaaatagagaagaaaaaattgctgcaaatgagttttttctta

SEQ ID NO: 85629 - DNA, 245 bp, Glycine max
  Clone ID: 700953415H1
agagagaaaattaacatgggaagaggaagggttgttctggagagaatagagaacaagatcaaccgtcaagtaacattctcaaaacgcagaagtgggttgctgaagaaggcctttgagctttctgtgctatgtgacgctgaagttgcccttatcatcttttctagccgtggcaagctttttcagtacagcagcactgatattaacaaaatcattgagaggtatcgccaatgtcgttacagcaagtc

SEQ ID NO: 85630 - DNA, 253 bp, Glycine max
  Clone ID: 700953416H1
gtcgatggagattagaaacgtgttgggtgagagtgtgagagaagtgaaagaggaagatctgcagaaacttccttatctgaaagctgtgattttggaaggcttgaggcgacacccgccaggacactttgttttgccgcatgcgtcactgaggacgtagtttttaatgattatttggtccctaagaatgggacggtgaatttcatggtggctgagatggggtgggaccctaaggtatgggaggatccaatggcat

SEQ ID NO: 85631 - DNA, 258 bp, Glycine max
  Clone ID: 700953417H1
ctgacaccctcccatttgctacaatgggatcaggttcacttgctgcaatgtctgtatttgagtccaagtacaaggaaagtttgagtagggatgaaggcattaagctagttgttgaggcgatatgcgctggaatatttaatgacctaggaagtggaagtaatgttgacgtttgtgtgataaccaagggacacaaggaatatctcaggaaccaccttctaccaaatcctcgtacctatgtcaatccaaaaggctttgatt

SEQ ID NO: 85632 - DNA, 256 bp, Glycine max
  Clone ID: 700953419H1
caataccttagcatgaaattcaactttgtgggactacatgttgaagtttgattggtgaacgagatctgatctcttgatccacaaaaccatggctgaaaaggtgaccatcatgaaactcaaggttgaccttgagtgtgagaaatgctacaagaaggttaagaaacttctcggcaagtaccctcaaattcgggaccagaagttcgatgagaaggaaaacattgtgttcatcacagtggtgtgttgtagccccgagaag

SEQ ID NO: 85633 - DNA, 254 bp, Glycine max
  Clone ID: 700953420H1
caaatagagagagaacttcaagtgagggtgagagtgacacaaatctagagagagcactagtactctaaaagtctattatattcttcaaaatatgaccatgcatcgcgagtcttgggcttttgtcttcggcgttatgggcacaatcatctcctttggagtgttccttgctccattgccaaccttttaccaaatctacaagaagaaatccactgaaggtttccagtcacttccttatgttgttgcactgttcagtg

SEQ ID NO: 85634 - DNA, 253 bp, Glycine max
  Clone ID: 700953421H1
caaggcagaaccaaatagctcattagtgagtttttgagttcgtgtgtcctttctttgtgtgttgcaaggttacaagatggaggatcaaaatgcatcatctaatggattgggcaaggtgttccacaaggttaagccctacttgctatgatgtcccttcagtttggctactccggaatgtacatcatcaccatggtttctttcaagcatggcatgagccattgggtactctccgtgtaccgtcatatagttgcca

SEQ ID NO: 85635 - DNA, 254 bp, Glycine max
  Clone ID: 700953422H1
cgttagtggactgatgtattaatccccaagtacatgtcaatcaggcacagagtcaccatgcatatagtttagttttgttttctggaaccaattattatttattggtactgactcattatgtaggcactggaatattcaacggtgatttgaagttagtgactcagcagcaatttgaagtacaggatcaagcacgccaccgttctcatgactctgggcaccaacattctttgagactaccaccttcgagtccctat

SEQ ID NO: 85636 - DNA, 256 bp, Glycine max
  Clone ID: 700953423H1
cagagagtgatttcagtgagtgatcggtgttcacttgatctcatcataatcgtcagcgtcaattgaagaagatgccgatcagaaacatcgccgtcggaaggcctgaagaggcgactcaccccgacacgttgaaggcggtttggctgagttcatctcaaccttcatcttcgtgttcgccggctcaggctccggcatcgcctacaacaagctcaccgacaacggcgctgccacccctgccggcttcatctccgcctcc

SEQ ID NO: 85637 - DNA, 255 bp, Glycine max
  Clone ID: 700953424H1
ggcttcaacgacggctaccgtgcggtcagaaccttcaccccgtgccgctcgtgcgactgggcagaagttcagcatggactcgcggcgcagagatggtacgccaccaatcacatcttgccagatggacgtcaaataattatcggaggaagaagacaattcaactacgagttttaccccaagacacaagccaagaatacttacagtttaccttttcttgctcaaaccaacgacgctaacgctgaaaacaatctctac

SEQ ID NO: 85638 - DNA, 252 bp, Glycine max
  Clone ID: 700953425H1
aattgttgtaactttttgattcctaaattctctaaaattcgaaattctaatttcgttaggggaaagagattgtttgtgtgtgagtgagtatggctggaaaaggcgagggtcctgctatcggaatcgatttgggaacacgtactcttgcgtcggcgtgtggcaacacgatcgtgttgaaatcatagccaacgatcagggtaacagaactaccccatcctacgtggctttcaccgacacagaacggttgatcgg

SEQ ID NO: 85639 - DNA, 247 bp, Glycine max
  Clone ID: 700953427H1
tgaaaagatgccttcaccccaaaaccagaagcattgaatgaacagaaggcattttcagcatcagcatcaacatgggtggggattctattgtttctcatggtacagacgaaggttcttgtttggaggagaattttccttgctttcatctcaccctcacctgctctcagggataatttgggcttgcaggatgaagacaacagaatgaaagcggagaatgggttaacttgtagtgaaactgatgaagaaa

SEQ ID NO: 85640 - DNA, 247 bp, Glycine max
  Clone ID: 700953428H1
gaaagagcttccttgttcaatggctccatttggctccttggtcattctcccctttttgttgatagcaacagtgacttgttctacttcagagaaggaaaatagtaaaactttcatagtccaagtccaccaccaaaccaagccttccatattccctacccacaaacactggtacgactcctccctctcttccatttccaccaccgcttctgttatacacacctacgacaccgtttttcatggcttctcc

SEQ ID NO: 85641 - DNA, 247 bp, Glycine max
  Clone ID: 700953429H1
ccaatttccccaccattagggtttttcatttgaaatgtggaagggcaacaatggagcccattgaatccgaatcagttagttcctccgccaaagaccagcaactgggtgaaccttcttccactgttcaccccccgatcacgatcctcaaccttcagatctcaatcgcgttacccctgttgatgatgcacttggtgaggagtttcagaacaagttggatttgaaggatgggggtgagagtgagaataat

SEQ ID NO: 85642 - DNA, 244 bp, Glycine max
  Clone ID: 700953430H1
cacgtttcacaatcactttttgcgcttctctcactcactcactcttcttcttcctcttcgtgtggttttctttctcgaactcgaactaagatgcgtgagattcttcacatccagggagggcaatgcgggaacagatcggagccaagttctgggaggtggtgtgcgcggacacgggatcgattcaacggggaggtaccaaggggacaacgagttgcaactcgagcgagtcaacgtctactacaat

SEQ ID NO: 85643 - DNA, 190 bp, Glycine max
  Clone ID: 700953431H1
caccatttcaaggcaattttatgaacacaagaggttaaattaactactccattaaatgatttcgttaaattattttataattatataagttattataaaataatttaacaaaatcatttaatggagtagttaattattttataataacttatataattataaaatgtataatttatagttttactgtttc

SEQ ID NO: 85644 - DNA, 136 bp, Glycine max
  Clone ID: 700953432H1
gagctacagcaccattatcattcatctccattactttcctattcgatcctcgatccctctcccacatagaagattcatcaccccaaaacccaatttttttttaataatacaactgcaattatttttattttctagt

SEQ ID NO: 85645 - DNA, 256 bp, Glycine max
  Clone ID: 700953433H1
cactcatatttggcatctgctggtattgatggtgtcaaagttgatgttcagaatatccttgaaactcttggagcaggacatggtgggagggtgaaacttgcaaggaaataccaccaggcattggaggcatcaatcgctaggaacttccctgacaatggaatcatttgttgcatgagtcacaacactgatggattatacagcgcaaagcgttcagctgttattagggcatcagatgatttctggccaagagaccctg

SEQ ID NO: 85646 - DNA, 252 bp, Glycine max
  Clone ID: 700953434H1
atgaagagcgaagagaatggctcccaagggtttaatctttttggctgtgttatgcttctcagcactgtcactgagtcgttgtcttgcggaggataatggacttgttatgaacttctacaaggaatcatgccctcagctgaagacatcatcaaagaacaagtcaagcttctctacaagcgccacaagaacactgctttctcctggctcagaaacatcttccatgactgtgctgttcagagttgtgatgcttca

SEQ ID NO: 85647 - DNA, 251 bp, Glycine max
  unsure (1)..(251): unsure at all n locations
  Clone ID: 700953435H1
tgcaaacaatgtcaccaattgggttggtaccatttggatgacacccatattangcgcctacattgctgacgctttccttggccgctattggactttgtcatagcctccaccgtttatctctcgggtatgtctctgttacactggcagtgtcccttcctagcctgaagccacctcaatgctttgaaaaggatgtgacaaaatgtgccaaagcctccacactacagcttgcagtgttctatggtgcactctac

SEQ ID NO: 85648 - DNA, 252 bp, Glycine max
  Clone ID: 700953437H1
gacctctggtgggacccaaaaggttggggtgaagaaggctttggttttctatggagggaagcccccaagagggatcaaaaccaattggatcatgcatgaatataggctaactgataacaagcctaacaataggcctctcctggttgtgacttgggcaacaagaaaaacactctaaggcttgatgattgggtgctgtgccgaatctacaagaagagcaacacgcataggtcacccatggagcatgacagggaa

SEQ ID NO: 85649 - DNA, 252 bp, Glycine max
  Clone ID: 700953438H1
tttttctccattagattaccaagctctgcaactttgcttctcaacatggagtatcgtctcctacccatttttactttactcaatattgcactggtggcaacccatgctgctttaccccctgaagtttactggaagtcggtgcttcctactacgccaatgccaaaagccatcactgatatcctttactctgattgggtggaagagtaaagcagctcagtgcatgttggacgtggaggcagtgaacgtgcatac

SEQ ID NO: 85650 - DNA, 125 bp, Glycine max
  Clone ID: 700953439H1
gcaacaaccaacgatgttacttaagtcgcagcactgaagaggttccaaaactttcttatggcacgttgcataataccgcaaatacgaaggatcataataacacaaggtctcaatgtgtgtccgag

SEQ ID NO: 85651 - DNA, 253 bp, Glycine max
  Clone ID: 700953440H1
aaaccctcccccttctccatgggacagtcaccgtccaccaccgccgcgcctccgccagacctcaaccgccaccaaattcctcagatacatccaaacaccgattccgatttcaccgattacaccctccgtctctccgacgattgcctggccgcaatctttcatttcctgagcaccgccgatcggaaacgttgctctctggtctgccgccggtggctccgcgtcgacggccagaggcggcaccgtctctccctca

SEQ ID NO: 85652 - DNA, 252 bp, Glycine max
  Clone ID: 700953441H1
gcattagaccatgaatctattctttccaaacctcactcactccctcttctctcacaatgccatctgtggccactttacagaacagttagttaatgatgtcatcttttgttgttcttcatggcctgcatggctctctctccgctcccagttcctaggccaagacaccctcactcatctctaccctcgtaacaaggcttccaccattcataacaagccaacaacagcacaaccacgtgccaaatttgacatgct

SEQ ID NO: 85653 - DNA, 250 bp, Glycine max
  Clone ID: 700953442H1
ctttctgagaaaccatcgattattatcattacaatggatcgttcagaatatcaaattgaggatgataacctgaagcttaaggttatcttccttccatttttatcaattagtcacataattcccatagtggacatgccagaatcttcgccatgcatgacgtggacgtcactatcatcaccaccacgtccaacgccgcgcttttccaaagctccatcagtcgcggtcaaaacatcaggacgcatgtcatgaa

SEQ ID NO: 85654 - DNA, 242 bp, Glycine max
  Clone ID: 700953443H1
aactcagcctccacagcactactgttatatatggattcgatgcttcttcgatcttttcctaatattaacaacgcttcttctctcgccaccactggttcttatttgccaaatgcttcatggcacaataggaaaatccaaaaagaatataattttttgaggtttcggtggccaagtttgaaccaccattacaaaagcattgaaggagggtgtacatgtaaaaatgtaatataaaatttgttgtg

SEQ ID NO: 85655 - DNA, 238 bp, Glycine max
  Clone ID: 700953444H1
ccactgtcctgaagaacctcctacctgccttgttccttttcctgaaggttataaacgcccaattgagtggcctaagagcagagagaagatatggtattacaatgttccacacaccaagcttgcggaagtaaaggccaccagaattgggtgaaagtaacgggcgagtaccttacttttcctggtggtggaacccaattcaaacatggggcacttcattacattgactttatacaagggc

SEQ ID NO: 85656 - DNA, 247 bp, Glycine max
  Clone ID: 700953446H1
cgaccaacgtgttggcactgcaaagtgcaaacaagctcgatcacttgaataactcagtcgaagattagattcagattcacggcgaaagaacaaaaccctaaaaaaatggatttccacggcggaggaccactccgttcccgcagttcccagtccccttctccctctcactccgcctccgcctccgccacctcctccatccacaagcgcaagctcgtgtccgaggaccacgcgcctcccttccccccct

SEQ ID NO: 85657 - DNA, 242 bp, Glycine max
  Clone ID: 700953447H1
gtcacttttatggacactgcaattgagataaaagatcttctttctgtagttgctgactcatacttattacgtaagggtgaaaaacaatctatgcttgttccacacttcagcaggatgagtatcaacgaagagaagtcagaagtctttcctccacattggatattcattctacattgactgttcctttaaagagtcctgagaaagtgaaagtcaagccatcacaaaagaagaacaagaaagta

SEQ ID NO: 85658 - DNA, 253 bp, Glycine max
  Clone ID: 700953448H1
cagctcgagttttcttcttcttctcttcccttactctcatcctcgattcagtggcagaggtgacggaattcacgtgatttccatgagtggctccgttttccttgaatcgaacaccacgtctgttcacggttcgcggtttcgaaattgagctcgattcctcgtcagtggtgatcgtcagtgcatgcatcctcggattggtaatgtgcgagcttgatccatctatttgcggcgttttgagttaattttgcctgac

SEQ ID NO: 85659 - DNA, 250 bp, Glycine max
  Clone ID: 700953449H1
ggagtgggagcttccctgtaaagtggcacatcataaaagatgtgccaaatgcaaattttaggcacattatactagagaacaatgagaacaaacctgtcactaatagcagagacacacaagagataatgcatagaaaggtttggaaatgctgaaaatattcaaaaaccataatttgaagacatctttgcttgatgactttatgtattatgaaaatcgtcagaagatcatgcaggaagaaaaggccaagttg

SEQ ID NO: 85660 - DNA, 249 bp, Glycine max
  Clone ID: 700953450H1
gcgagggagaacgagacgtttgctttccaggctgagatcaaccagctcctcagtctcatcatcaacaccttctactccaacaaggaaatcttccttcgtgaactcatcagcaacgcctctgatgctttggacagattagatttgagagtttgacggacaagagcaagctcgatgctcagccagagttgttcattcatattattcccgacaagactaacaattcgctgaccattgttgacagtggcattg

SEQ ID NO: 85661 - DNA, 254 bp, Glycine max
  Clone ID: 700953451H1
ccgaaacagtttccatctctctcacaaaatgacaacaatatcaaattgctcccttctcttcctcttcctcttcctctccaccctccacatagcttccaccctctcaacccccaccaacttcatcaagtcctcctgcagcaccacccagtacccagccctctgcatccagtccctctccgtctacgcctccaccatccagcaagacccccacgagctcgtccagacagccctctccctctccctcaaccacaccg

SEQ ID NO: 85662 - DNA, 248 bp, Glycine max
  Clone ID: 700953452H1
tcccttctctactccattatccacacaacttgcaactcttcccggatccccaacgccatacctcagatctgtacgtcgtcgtttctatctacctcttaccgtttccgttcaggattaataatttagatcccctatgttgcaacagaacaaggaatcttcttagattctttttctgcgtttattagcgtttcacaaatagagagagagaaacagaaacagaaacagaagaagaaacttttcttatttat

SEQ ID NO: 85663 - DNA, 248 bp, Glycine max
  Clone ID: 700953453H1
atcgagataactagaaacagtgtgatgaaaatgaaggtccttgttttcttcgttgctacaattttggtagcatggcaatgccatgcgtacgatatgttccctctccgaatgaacactggctatggtgcccgtactccggaggtgaaatgcgcaagttggaggcttgctgtggaagcacacaacatctttggctttgagaccattcctgaagagtgcgttgaagcaacaaaggaatacatccatggcga

SEQ ID NO: 85664 - DNA, 251 bp, Glycine max
  Clone ID: 700953454H1
cgaattttctgcagttgcactcctaatcatatgttctgggggcccttgctgctctgcttcatgttcaccaacaattcaggctgctcaataagattgaagaaaaaaaagttttggtagccaggtgctggagttttgcttgcagctcttttctaaggtgtcaatgatatgaggtgtaaaaagcaatgttgatgtgggatatgctcaactcaatatcagtgttgtgacaaggcacatggaatgacatttgctgg

SEQ ID NO: 85665 - DNA, 252 bp, Glycine max
  Clone ID: 700953455H1
gaacttcctttatcaccagagcaaggaccagataagagaggccgtcaaactcctcgatctcgataacgtccattccctgttcgatgaattgattcagagagcttccaagtgtgttgcttctccctcttccaaaaaagttactctaacgctaaagggttctgcttcctcggttcctaccagcttgtccaagaattcggttcctgtgggcggttttgataagccgccacttgcccctgctgctactacttctag

SEQ ID NO: 85666 - DNA, 252 bp, Glycine max
  Clone ID: 700953456H1
ggcttccctggcggcttccaccgcggctatgtcagaaatccttggaaaccccgttaacctcagatgcgcaaccaggtctgctccatcaccaactacacctgccaccttcaagaccgtcgcacttttctccaagaagaagccagctccacctccaaagaaaaagcctgccgctgtatcccccgccaatgaggaactcgccaagtggtatggtcctgacagaaggatcttcttgcctgagggtctcttggaccg

SEQ ID NO: 85667 - DNA, 246 bp, Glycine max
  Clone ID: 700953458H1
accacgttgcagaggcttcaggagaaaagggatgctgctgtatttgacattgtgaatgctcgagaaaagcagaggaaggtcacgataagtgatttggctattgtctccaatgggggtaaggggacatttcatgtggaggacaaaccagtggatgctgtgtcctttgcagctaatggtaatgtggaagaggtggtactttctcctgaaaatggaaatgtggagttgtcttatccagacttggtaaaa

SEQ ID NO: 85668 - DNA, 243 bp, Glycine max
  Clone ID: 700953459H1
atgaagcaggctttctctagcagctagagatggcagagggaagagggtccactctcgtgcacctcttggtcgtggttctgtgcttggtcgctttcgggttcgccattgccgccgagagaagaagaagcgtcggaaccatgcacaaaattgaaggaacaaatgaaacattctgcagctatagttcagatgttgtcactggttatggagtgggcgctttcctgtttcttctttctggtgaatcac

SEQ ID NO: 85669 - DNA, 244 bp, Glycine max
  Clone ID: 700953460H1
caccattctagatatcagagaactttgcagctctcttaggtttttaaaaaacaccacgcaaacagcaagatggccacttccgacagtaacatgctactaaattatgttccagtttatgtgatgctcccactcggagttgtcaatgttgacaatgtttttgaagacccagatggccttaaagaacagctcttgcagcttcgagctgcgggtgttgacggggttatggttgatgtgtggtggggga

SEQ ID NO: 85670 - DNA, 239 bp, Glycine max
  Clone ID: 700953461H1
cccaattactggtactggcattaacccagcaaggagtttcggagcagctgtaatctacaacgaagacaaaatctgggatgatcagtggatattctgggttggaccaattgttggagcagcagtggctgattttaccaccaatacatccttagagcagcagctatcaaggctcttggatccttcaggagcaacgcttaattaattaatcaattaagctagctaccttgattaatttgcca

SEQ ID NO: 85671 - DNA, 227 bp, Glycine max
  Clone ID: 700953462H1
ggctcgaggttgtgttgtgttgaagtagcaccctagcaaagatgttacgcatcttaggaggcaataaggggcacaagatcaagggtactgtggtgttgatgagcaagaatgtgtggacttcaacgaaatagtgtccactactcagggtggtttggttggtgctgccaccggcatcttcggtgctgccaccggtattgttggtggagttgtcgatggtgctactgcca

SEQ ID NO: 85672 - DNA, 242 bp, Glycine max
  Clone ID: 700953463H1
atattccccctttccctagtttagctacttacctcaatctttctcatgggaaagtttgccctagccaatatcctcttggtccttctcttgaacttgagcactttgctcaatgttcttgcttgtccctttgcccttacccttctcccaagcctccaaaaaagcctcccgttgtgaaaccaccggttcacaaaccaccaaaaccatgtccaccacccaagtcatctccaaaaccaccccatgta

SEQ ID NO: 85673 - DNA, 254 bp, Glycine max
  Clone ID: 700953464H1
cagctcgagtcttaatttcataacaaaagaaatatcattcatttgtgctactagcagctactatctatatctatatgtgcacaatagagcttctccaaatactctgaaaacctactccaaattttgcatgctacctgacaactaagaaacgtgctgctgtcctataatttgaactacttatcactgtcaattaattcagagttcagcagagtgccccaacatgctgaaaaagggaaatggggtgcctgcttatt

SEQ ID NO: 85674 - DNA, 252 bp, Glycine max
  Clone ID: 700953465H1
cgttcttcttcttcttttctttctttccaaaataaaatcttttacccttcacacccccacccctttgggtttctctcctcaattttgcatctggcggcttctcagttctcaccaccatcatggtttcacttggagctacctgtgctctgtgctgttctatgttcatggtgtttgtcactttgagtttggctggggacatagtacaccctgatagtattgctcccagaaggcctggctgtgacaacaactttg

SEQ ID NO: 85675 - DNA, 223 bp, Glycine max
  Clone ID: 700953466H1
tgctgttcttgcgcgtgaacaagcctcaggtaagccaaaaccatggttaagcataacaatgttatcccaaacggacacttccgtaagcactggcagaactatgtgaagacttggttcaatcagccagcacgaagacaaggagacgattggctcgtcagaagaaagctgtgaagatattccccagacctacggctggacctctcaggcccattgtacatggtca

SEQ ID NO: 85676 - DNA, 249 bp, Glycine max
  Clone ID: 700953467H1
gcaaaacctctcttcttctgattgattcacttctcgatttttctgttttcgttttcattttcggtttccgatctaatatcgatgcgattcgccattgccggaaaatgagtcctccggcgagtgtccggtgatgatcgctctcgagagaggctgttgttgttgttcttcttcgacgtcatggttttgttctgagattctgctcactttcaccaaaacggctttactatgtaccgcgtttcgctttcgtgt

SEQ ID NO: 85677 - DNA, 242 bp, Glycine max
  Clone ID: 700953468H1
cagaaaagcgttaatctccgatggcttcgtcgagggacaaggaacccgcgccgccacatcatcacccacctcttctgagcagcctcgtcgtccgcccctcccacaccgaggccgtcgcagctggtggtggtcgcgtcgccgacttcgagcctggcgaactccaccgtgatccccctcctccttattcccgctccgatcgatatcccgatgaacctgctctgatgttgcctgcaagatcttgg

SEQ ID NO: 85678 - DNA, 248 bp, Glycine max
  Clone ID: 700953469H1
ctcgagccgctccctttctcctcggtccacagagacaaaatgtaagacaggtgccaacagtacatcacgaaagaaaggactagctgagccgagatcactaactaaaacgaatttaatactaatcgaaaatataatagaatagaaatagaactgtcttttcatatagatatcccttcaacacaacataggtcatcgaaaggatctcgaagacccaccaacgcacgaaagccgggatctttcagaaaatg

SEQ ID NO: 85679 - DNA, 247 bp, Glycine max
  Clone ID: 700953471H1
ggaacacaaaaaatggcagatattcctcgggtgaagcttggaagccaaggcctggaggtttccaagttaggatttggttgtatgggcctaagtggagtgtacaacgatcctgttcccgaagaggttggcatctctttgatcaaacacgcattcaccaaaggggtcactttctttgattctgcagatttttatggagcacgtgccaatgaagttttggtcggaaaggctctcagggactttcctcgag

SEQ ID NO: 85680 - DNA, 247 bp, Glycine max
  Clone ID: 700953472H1
gtctggtgcataaacctcaacaacacactcttcaattttctagggtttgagttttgctccctttttcttcgccttctccaatggccgcttcctcgctcctgagatccgcgcttctcgctccttcctcctgcgatcgccccaaggtatataccaatgcctcaagttctaatttaaaatccaagggattacatagcagcatttttggtacttcaattcaatgtgactccttagtcttacaaaattgcaa

SEQ ID NO: 85681 - DNA, 246 bp, Glycine max
  Clone ID: 700953474H1
tggagagcttcacttggcagtgagattcacttgcaccgcatgggttaacatggtagcccagtatggtaggcctttactgcccaaaatgcattatgtccaaccaatacccgtcaggcacatagattggctcgccaccaggtcatgcagattgtggcagctcgcctatctagagccgagccaccccttaggcgtgaagcagttgagtacatgctcgacgttgactaccacatgtggagtctaaggaga

SEQ ID NO: 85682 - DNA, 242 bp, Glycine max
  Clone ID: 700953475H1
cttagccatgtctctcccacacactaggaatgtgtgttttggtgtacggttcttgctctggctgtggccacaagtgccagaaacgttcccaaccccaaggatgctggtcttaaggaccagaagaacttctcagctatggtggagttggtggttttccgggattgggaacaatggactgccttttggaccatactgtgccggaataggtggtggttttggcggaggtggtggacttggtggtg

SEQ ID NO: 85683 - DNA, 240 bp, Glycine max
  Clone ID: 700953477H1
atataatagcccaggaatagaaaattccaacagcaccgtcacttcctctaccgctttcttcctcctcattaaggcgcaactctctctctctctttctttttctttgttaggtttggtgacacttagtagaaagagcgtgcgaagagggtggggagaagatttagtgttgtggccatggcggagtctgagaagagtactgtgcttgttacgggagccggtggtcgcacaggacaaatagtt

SEQ ID NO: 85684 - DNA, 240 bp, Glycine max
  Clone ID: 700953478H1
gcaacacaacaaaaaaagactacacagagagaagcgtcttaataaacgctcttctctgaaaaacctgatttcttctcttcttctcttctctttcgtttcgatcttcgatctctgaaaatgagagaggcatttcaatccacatcggtcaggccggtattcaggtcggaaacgcctgctgggagctctactgcctcgaacacggcattcagcctgatgggcagatgccaagtgataagactg

SEQ ID NO: 85685 - DNA, 239 bp, Glycine max
  Clone ID: 700953479H1
caggtcgcctgcccttgctatttggacaagacaaatcaggggtttccaaataagttaaacatgataaaacggtttccaagtaggaacaaccagaggtccaaaggcatcaaggtaaagcatgttctcaaattgttctgttgcttggtgtttgcttctggttgatctaccaggttaagcacaatcatgataaacagaatgaatttgccaacgattcaaaactgtcagtcagtacacagaca

SEQ ID NO: 85686 - DNA, 241 bp, Glycine max
  Clone ID: 700953480H1
attcattctggatttctaatttctcgccatacacataattgtctcatagacataacaaagagagagatgcgaagcatggcaagctcggcttcctcgcgaggcattgcagccatcgtcggtgtgggcccaaccttggcctctccatcgctcgcaagttcgctcacgaaggctacacagttgccatcctcgcgcgtgacttggggaggttgtcaagatttgctgacgaaatagcgagggaaga

SEQ ID NO: 85687 - DNA, 247 bp, Glycine max
  Clone ID: 700953481H1
aatagattctttccatcagtttgctggggtgaagtggctgcgggagaagcctttgtctaagtttgaagatgtgcaatggctccttatacacaaggcagaagaggagaaactcattcaagttactattaactgcctgagcagtatcttaataagttaatagaccaattcaatgaatattatattagtgacagtgttagcagatctgctcagctgtggaatgatcagaggaagttgatactgcatgatg

SEQ ID NO: 85688 - DNA, 173 bp, Glycine max
  Clone ID: 700953482H1
aaacaaaccccttctctctctaccacctctactttctctctctagggtttcgtcgcgaactctcactctcgctttcgctctgcttgtcacgattgtagggttccaatcctcgcgcgaattgcatcacagctgtgatcgaccgagttttgattcttccccttcctcggggtgtt

SEQ ID NO: 85689 - DNA, 241 bp, Glycine max
  Clone ID: 700953483H1
cttgtttcacaagtttccttggaagcggacgcagttaccctctctacctttcttctattttctcattcctgcctctcttctcaacatggccgccaacagatggttgaaacctgaggtatacccactcttcgcttcagttggtgtggctgttggaatctgcggtatgcaacttgttaggaatataaccaccaatcctgaagtcagggtgaccaaacagaacagaactgcaggaattcttgag

SEQ ID NO: 85690 - DNA, 243 bp, Glycine max
  Clone ID: 700953484H1
gcctcccataaaaatgaagaatactatcttctctgctctctttctactttgtgccttcaccacctcatacctaccttcaaccaccgcggtggtcgataccgacggtgatattcttcagaatcctggcaatactttatcttgtccgtttttcgacccggcggcggagtagaattcgccgccactggaaacgaaacttgccctctcactgtcgtgcagactctcttcgggaggggctttccagca

SEQ ID NO: 85691 - DNA, 243 bp, Glycine max
  Clone ID: 700953487H1
ctttccctttctctctttttttccttcatcaatggtggcggtaacttttgagaaagctctgtcttttggctcttggagctcaaaagcaagagcaccttagattataagatcggtttcgctttcattctgcccttttctcagagagagcaacgaggtcttatagttaaatctgatgctgaagattgaggaacttaaagtttgaagtttgaggagtgtttgtgattacaaagaatatggatcaaa

SEQ ID NO: 85692 - DNA, 239 bp, Glycine max
  Clone ID: 700953488H1
catcttctgccacctgtttctaactccccaacccaagaaatttccttttacccctttcccctctcctcttttcttattcatcaaaattcctctttggtgtcctctccctcggtcaactccgtttactataatatgaccactcttttcttcctcttcttcaacttcaatactcacctttgaatggattctaattcttcttctccaagtcccaacaaccacgcttccacaaccaaaatcaa

SEQ ID NO: 85693 - DNA, 242 bp, Glycine max
  Clone ID: 700953489H1
atcaaaatgaagaaacccaatgctgcgatccgtgatgctaatgctgctttggagattaatcctgattctgctaaaggatacaagtcacgtggcgtagacgagcaatgcttggtcaatgggaagaagtgcaaaggatcttcatgtggcttcaaagttagactatgatgaggaaataaatgctgtacttaaaaaggtggaaccaaatgctcacaagattgaggaacaccgtcggaagtatgaaa

SEQ ID NO: 85694 - DNA, 165 bp, Glycine max
  Clone ID: 700953490H1
acgaaagtaaaacgaaactcaatcatgtacattcaccctaagcatacttggagaatgatttgttatcaagtccccattagtcatgttggactattcctttttaatgtgttacatgaagtaaatgtgcttggtgctgtggaatttaatgatgctacgttggcagtg

SEQ ID NO: 85695 - DNA, 239 bp, Glycine max
  Clone ID: 700953491H1
caaaattgtaagctacttgaggagaaaaatttactacttgggagtgttttggagctcaaagatgcaaagtttgctgctgaacaagagaatagtgtaatcctccatgaggcactggctctaaaaaaccttagtttggtctatgagagctttttcactgagaaggtcttggaacagcgtgcacttgctgaacatctcagcgatcttcactctgtgaacagtgaccttaaacaggagcttgt

SEQ ID NO: 85696 - DNA, 237 bp, Glycine max
  Clone ID: 700953493H1
aaaagcgtcacgagcgagagaggaaggaagagaagagagatagggagagcgagcgtgagaggaagatcttcgatttagggttttcaatttcgtattcagcaaggcggcgagtgtgagatttttagagagagagaggtgagaacgctgagtgctctgctgagagattccattgccccaagagaaggaagaggaggagaaggtggatatatatatatatatttttctttctgtttattt

SEQ ID NO: 85697 - DNA, 238 bp, Glycine max
  Clone ID: 700953494H1
gtaaagagaaatgaatgaaatgatatagttgagtttggagcgaaacagaagagaagaaagatccaccgatgaagaaaaataaagagaaagagaaagagaagtgcgtggctgtgacaagccctgtgagtggcgaagacagcgatgataagcaacgccctgcctttccctcggtcagattctcttcccgcaacgcttcttccaaatacgatttcgtcaaggtgaaggtgtggttgggtga

SEQ ID NO: 85698 - DNA, 237 bp, Glycine max
  Clone ID: 700953495H1
cgagaacattatccaagaataggtgtgctgaaatttctggcgtgcagaagaccaataatcagaccataaagtttttaccgttttcaaatgataggcgtaaaaatggccttaacacattcaacactttcccacgaatgtttcagagggctggttcagctcagtttagaaggcctctccttcatttggtgtccactcaagaatcaaggcacaggtacctcacccaatgtgttccccttc

SEQ ID NO: 85699 - DNA, 238 bp, Glycine max
  Clone ID: 700953496H1
catcattgtattgtacagcacagccccaacttcttacttgtgttctgttctgttctgttctctctttctctttctcttctttttttccacgcgattctttcaattttcaattttgattcaatcaattcttcttttacattctcgattccttcctttcttacttaaaaattcttatattatgcatcatttctcaccaaccacctagggtttctctccgacgttaggtttttttttctcg

SEQ ID NO: 85700 - DNA, 256 bp, Glycine max
  Clone ID: 700953501H1
aaaagattcagtgaagaacaacgttaatggcatctcttggtgtgcaagcagttcatcctcctccattaacatccacctccgacccacctcctctttttgatggcaccaccaggttgtacatcagttattcttgcccctatgcacaacgtgtatggatcgctcggaacttcaagggactaaaagacaagatcaatttggtgcctataaaccttcaagacaggccagcttggtataaggagaaagtctactctgaaaa

SEQ ID NO: 85701 - DNA, 252 bp, Glycine max
  Clone ID: 700953502H1
taacaggcgaactgatttcgttatcagaacaagaattggtggattgtgatactggatataaccaaggatgcaatggaggacttatggactatgcatttgagttcataatcaacaatggcggcattgattctgatgaggattacccataccgtggtgttgatggtagatgcgacacatataggaaaaatgctaaagtcgtttctatcggggcctacgattgtgcacagaaagtgcttctaaactgtttcgata

SEQ ID NO: 85702 - DNA, 248 bp, Glycine max
  Clone ID: 700953503H1
ctctgatggattatgatggattgaacgctgttgggacagggttggggactgcagctgtaattgtgatggataaatctacggatgttgtggatgctattgcaaggctttcctatttctacaagcatgaaagctgtgggcagtgcaccccatgcagagaggggactggttggctttggacgatcatggaaagaatgaaagttgggaatgccaagttagaagaaattgatatgcttcaggagttgactaaa

SEQ ID NO: 85703 - DNA, 244 bp, Glycine max
  Clone ID: 700953504H1
gttcattctctttgcgcagttccctacctctcctttcaagatgcagatcttcgtcaagaccctcaccggaaagaccatcacccttgaggtggagagctctgataccatcggctgcgtagttgtcaagatccatgctgatggaccattctattgtggtcagctttgctcaaggtggaaggacggttgtgacatctcgggtttatccaacaaaggcaatctatggagctgctaggttgttcttgtt

SEQ ID NO: 85704 - DNA, 247 bp, Glycine max
  Clone ID: 700953505H1
gaagaagctcctccagtgccacctgcaccgcccatagtggccatgctgccatcccctggcatgggccacctaatcccaatgatcgagttcgccaatcgagcagggcgttaccaaaatttgcttggaacgcatcagaaagcttgctgacaactgcacaggtctccaaggttttctggttttcaatgctgtgggtgggggaactggctctggacttggttcccttttgctggaacgcctttcagtggac

SEQ ID NO: 85705 - DNA, 243 bp, Glycine max
  Clone ID: 700953506H1
ccttccccctccacccacccagcatatctctccatgccgatggtacccagccacgggtggaagctgccatggttaatgccagaatacgcaagcctgtcagagcaaaccaagccaaagttgggtacattgggcctgctactgatttcaactatgaccacaaacatcttggtactggccctcaaacacttctcgaaattgctgagggtcgccacccatttttcaagacactctcgaatgccaaaa

SEQ ID NO: 85706 - DNA, 243 bp, Glycine max
  Clone ID: 700953507H1
tcctcgtgtgcgtgaaaacgaagcaacgccacacgatggtgttctacttcaaagcgcgccctgaagccggcgatttcaccatcttcatgggcctcgacaagttcgagaacgaggaactcatcagatacggttttcccgaagatatcaggttccctactgttcgtgaggctgcatctagtaaagacaaaattacagagaatgctagcaaaaataggctgaagaagagaattttggctgacattt

SEQ ID NO: 85707 - DNA, 244 bp, Glycine max
  Clone ID: 700953508H1
cgatttcgttctgcccctcccgcaaatctcaaacaacaaggcgaagctgccaataataatgggagcgcgtgggagggttctgaaccgcttttgagattcttgaattccggggacacccatgatacgacgtcgtcgcctaccttacgagaattcgtggataataaggttgctaataatagtaaacctgcgaaggagtcatcagcacctctgagtcgcatgaattcccaacagggttatagtactt

SEQ ID NO: 85708 - DNA, 239 bp, Glycine max
  Clone ID: 700953511H1
ctctgagtagaagaagatcaagatcaaggaagaggatgtcgaaagaggatgtgtttgttggcgcgatcgaccaaggaacgagcagcagcaggttcataatatacgacgcgaagactggagtagtaggatgccaccacgtggagttcacccagttctacccgcaagccgggtgggtggagcatgaccccatggagatcttggagagtgtgaaggtgtgcgtggccaaggccgtcgataag

SEQ ID NO: 85709 - DNA, 238 bp, Glycine max
  Clone ID: 700953512H1
cttttgtctttgtttctcttacaattttattttgcttctcttccttggagaagagttttgcctttcaaacaacaaaggaggacacagaaagcaacaatcttcatcaatatactcatcttgttcacctcagctcactccttccttcatcttcctgcagctcttctgccaaaggtcccaaaagaaaagcatcattagaagtggtacacaaacatgggccatgctcccaactgaataatca

SEQ ID NO: 85710 - DNA, 241 bp, Glycine max
  Clone ID: 700953513H1
gggttctgagctcatacactgcaatgctacctacgatagaaagtctcttctcatcaatggttagaggagaatcctcatctcgggctccattcactatcccagaagcacccctaaggtttgtgtttcattttcttcactctttatgtgtttcaatcttaaaatgtgtttcaagctttgtgttgttttgtttgcttcaaatgtgggaggatctaattcggaaggccaaacacggaggacttga

SEQ ID NO: 85711 - DNA, 243 bp, Glycine max
  Clone ID: 700953514H1
attacaaggagttttttttatatagaattgagaaaggaaacacacacaaactaagcagtagttcagctatttatactgattttttacaaataaacaactcactaatattagtaatttgttacaattgttttaactacaagcttagtttgttagaactattttaattaccaacttaatttgttacttatgtgaaccaacctatcaacaatttgcatatataggatatgattacgaaatttcaga

SEQ ID NO: 85712 - DNA, 256 bp, Glycine max
  Clone ID: 700953516H1
ttcggctcgaggaaagatcaccaatcggccccttgctggtactgttagaagaggaaaaacaccaaaagaagatatcatgttggagaaacaacttttgaatgatgaaaagcaatgtgcagagcacgtaatgctagttgatttggggagaaatgatgttggaaaggtctccaaaccgggttctgttcaagttgaaaagcttatgaatattgagcgctattcccatgttatgcacatcagctcaacagtcacaggggag

SEQ ID NO: 85713 - DNA, 243 bp, Glycine max
  Clone ID: 700953519H1
gtctttgtttcttgttgagtaacaactcaacctgtgacagtttcaaatgagtgaagcaacggcaagattcgaacggcgggtcctggtggcggtggacgaaggcgaggagagcatgtacgctctttcttggagcctcaggaacgtaattttccaaaatcccatatagtacttagttgcagcttttcaattcttcttcttctcatgagttctactctttcttggaaagtgcttttgaattctgtt

SEQ ID NO: 85714 - DNA, 242 bp, Glycine max
  Clone ID: 700953521H1
gtggaacctctctctctctctctctctctctgcggaaaccggaatatctcagttctctgatcagatccatccgacgtcgtttcagtgataatggctccgttcagcggcgatgagacggcaccgtttttcggcttccttagagccgcagctccttttcttttcggtcaatgctagcggtcaattttgtggagtggctgagatgaccggacgtgttgatttcaataaaagtatggatttctggc

SEQ ID NO: 85715 - DNA, 241 bp, Glycine max
  Clone ID: 700953522H1
ccgattcattaacttcacacacagacacggtgtctccaccacaccatagcatatagtactagtagattaaacgccacagaccatattcacacacttcgcatcggaaacccctcaaaatgtttaaaatgggtgattaaagagacttcacttttgggattgagcgaatccaagaagcttctagtacatgcttctgattccaatttaaatggtggcttggaagttcatccaaaacaaagttcta

SEQ ID NO: 85716 - DNA, 218 bp, Glycine max
  Clone ID: 700953523H1
caacaacattcattcattcacagctgtcacgccgtgaacggaaaatggcaacggcgagacgcatttcccgcctatcaccgaatgcaacggaacgacaccgtgcgagtctgtggccgccgacctcgacggtacgctcctcatcacccgtagctcgttcccgtacttcatgctcgtcgccgtcgaagccggcagcctcctccgaggcctcatgctcctgg

SEQ ID NO: 85717 - DNA, 237 bp, Glycine max
  Clone ID: 700953526H1
tgaagaaggtgtgttgaggagggaatcaaaggaatcttttgaagggtgaagagagtaaagaggtgaagtgttggtgggttttgctcagatttcttctctctgttgaggatcatgaaattgaagtagatatacttgacaggtttgaatagtagggaatgggttatgctgcagttgaagttgctgttttcccagatgcggattacttagacttttaggggatgttattctgattagtga

SEQ ID NO: 85718 - DNA, 231 bp, Glycine max
  Clone ID: 700953527H1
cacaaagcacaaagcaaagctcatccttgagttaaaaaatggcagcagcttcttccatggctctctcatccccatccttggctggcaaggccgtgaagctgggcccatcagccccagaagtgggaagggtgagcatgaggaagaccgtcaccaagcaggtctcctcaggaagcccatggtacggcccagaccgagtcaagtacttgggcccattctctggcgagcccccgt

SEQ ID NO: 85719 - DNA, 235 bp, Glycine max
  Clone ID: 700953528H1
ctagagttttaaaaatggcagcagcctcctccatggctctctcttccccatccttggctggcaaggccgtgaagctgggcccatcagcccccgaagtcgggagggtcagcatgaggaagaccgtcaccaagcaggcctcctccggaagcccatggtacggcccagaccgcgtcaagtacttgggcccattctctggcgagcccccgtcctacctcactggcgagttcccaggtga

SEQ ID NO: 85720 - DNA, 242 bp, Glycine max
  Clone ID: 700953532H1
ggcatctttggagcaaaggcaagaagaagggagaagggggtttctgaaactgttgcttggaaatctgggagttggtttgcctgcactattgggaagtggcaaagcttatgctgatgaacaaggggtttcatcctccagaatgtcttactccaggtttctggagtatttggacaaggacagagttaaaaaagtggatctttatgacaatggaaacactgctgttgttgaggctgtttcgcccg

SEQ ID NO: 85721 - DNA, 153 bp, Glycine max
  Clone ID: 700953533H1
cctgagtggattgattttccaaggggtgatcaacatcttcctactggcgtaatagttccagggaataacaacagttttgataaatgcaggcgtagatttgacttgggtgatgcggactatctaagatatcgagggatgcaagaatttgatcac

SEQ ID NO: 85722 - DNA, 238 bp, Glycine max
  Clone ID: 700953534H1
cgacggtgaaacttgttttccttgcgcgaagtttggcattcccccaatcgcttcatcctcatctacttaaccctaaccccacactctcacatactacatatataaaaccgccgtcacgatgatgctcagaattcgtagccgcgatggcctggatcgagttagcttcgaaaaatctcggggcaatggcaaagtcggttctattggtgctacgaagatgttcctgcctatgatgagttag

SEQ ID NO: 85723 - DNA, 243 bp, Glycine max
  Clone ID: 700953536H1
ttcagattggtcaagctccttttactccccgcaacaaaacaccacctagttgcagattttttcttcttcaaaaatttgtttatctttatcctaatttgatttggctttaaggttttccattatagcggttttctgaaagaatcccctgggatcagcaacgtctcatcttcgccggaaagcagctcgaggacggccgtaccctcgccgactacaacatccagaaggagtcaacccttcaccttg

SEQ ID NO: 85724 - DNA, 153 bp, Glycine max
  Clone ID: 700953537H1
cacacaccaatggaatcataacaagaaaaagataaacactccccagagttcaaagagcaagcactatttcctctgttgtgtcttttttcaatttgttttccctctctgtagcagcagcagcagtgatggaacgtgctcgcaggctagcaaacc

SEQ ID NO: 85725 - DNA, 238 bp, Glycine max
  Clone ID: 700953538H1
ctcaagtcccaacctgcttcttattgaagtacccaaagcatgtctacaaccgaaaaggggctttcaagtgctttgaatgccagaatcgaagggtgcggcactgaaactatagtgtttgctcatggctatggaacggaccagtcgatatgggacaaaatacatcctttggttcttgctttaaattaccgtcttgttacgtttgattgggcttttgctggaactgtgaaggatcagagcc

SEQ ID NO: 85726 - DNA, 240 bp, Glycine max
  Clone ID: 700953539H1
acaaaattaaacatttcgaacaaaaatagattcttctgcttccaacacaaataaacaccactcaatctaccttgtacacgtgactcatctcttcatccaacactagttgagttcttagcttattggagaaaatttgtgttgaggcaaattttgtttccttgcattatcacctcatgacgatgtcaggctgcacaatggccagactctcgatgacctgagtgaggctttactggaagattg

SEQ ID NO: 85727 - DNA, 237 bp, Glycine max
  Clone ID: 700953540H1
tccattttcttgtgttctgcctccatcgagtaccaagaaaacagaacaaactaaaaatgggactcttttcttctacaaaactgcttccaattgttgtgctgttttctcttcttttcacatcttatgccacaaattcagctgaaaacaactttgttcactgccttgtgaaccattctgagccctctcaccccatatccgcagcaattttcacacaaaacagttcctcattctcttcag

SEQ ID NO: 85728 - DNA, 241 bp, Glycine max
  Clone ID: 700953541H1
cggctcgagatcaaaccacacacctcacctattagaagtaacaaaagaccctccctctcaaaagactaaacaagtataaaaaagaaggcacttccctcaaacagaaactaccctctatctctctcttttcaagccttaaatgagtaaaaaagagtgaagacaggaaagaaaggagcaccatttttggtttgagaaacataattagcaagagagttcaaaatggggaagagagagtttaatg

SEQ ID NO: 85729 - DNA, 236 bp, Glycine max
  Clone ID: 700953542H1
gaatctaatataacgttattcatagtgaaaataaatcgagccaaggaatttattaataattgtcttcatttcatattagctgcctgctgcgacttccttatgcataattttactgtttatagaaattgtgaagctatactgttgtaattgtcatgtaaattgttccctttttcatcttacttgatttggtaaactccggttacttgtatccaaataagatgggccatttgtattgc

SEQ ID NO: 85730 - DNA, 234 bp, Glycine max
  Clone ID: 700953544H1
ttttgcaatcagagagtgaagagaagagaagaggttgatgggtcggcgaaagaacaacagcaacaacaatcagtgctcctcaagcaaggaagacgctgacatgaatagcaaccaccttcggtttgaagaagctgacgaggctgtcgacgagagttccaacctcgaccaatccatgtgcgacatcgaagaatccgatgataaaaccagcgccgactattacttcgattcctactc

SEQ ID NO: 85731 - DNA, 236 bp, Glycine max
  Clone ID: 700953545H1
tctctctcctcacgccaaaccacaccagcttcgtcccttcatctcctcactttctcatttgtggaattacttttgtctcttcctctctgatcttccacaggctcctattatcccttttgctttcccaatccttttcgcgaaaaaaaaaagttcactttctattttggcccccttttgtggttcctgaaacgcgttaagggttctgtttgtgttattgggtcaataatggggtcctg

SEQ ID NO: 85732 - DNA, 238 bp, Glycine max
  Clone ID: 700953546H1
atcccttatcctcccaaaaccaaaccatgtctacctccgcagcttctctcgcactcccaaccctcactctccgaactcgacaacctctctgttctccccaatgcttctcctcgtccctctccctcacccctaactccaaacccatttccatttccgccgttttcctcaaaacaacgctgtcgtcgtcgtcgccgttgtcgctgtcgtctcgcttcgttccccatgtctctgtgttgga

SEQ ID NO: 85733 - DNA, 219 bp, Glycine max
  Clone ID: 700953547H1
cctttctttaaatcccaatattttctgcgcgaattttgctagaaaccgttagtgggtatcctcaaaatactagattttcgattcgtttggtgaacggatttttaggtgtgattattacgttttttttttgttcaacaagctatggaggtttcggtgattggaagctcacaagcgaatctgggcgcgtctgaattgccttctagggaagtgggatttgga

SEQ ID NO: 85734 - DNA, 242 bp, Glycine max
  Clone ID: 700953548H1
gctcgaggtacagcgtgcacagttcaattgatcaactcagatttcagggacctaagtctagctgctaatagactcgcccatcatgccatcaaacttggtggcattggctttggagcctcttttttcggaggatttgctgccattgctgcgactcaacccggggatttgggatcgtacaaaacgggtaaccaatattctcacagcacttactcattccatacatttccttcagcttgccttca

SEQ ID NO: 85735 - DNA, 249 bp, Glycine max
  Clone ID: 700953549H1
atctcctttaccaccattctagatatcagagaactttgcagctctcttaggtttttaaaaaacaccacgcaaacagcaagatggccacttccgacagtaacatgctactaaattatgttccagtttatgtgatgctcccactcggagttgtcaatgttgacaatgtttttgaagacccagatggccttaaagaacagctcttgcagcttctagctgcgggtgttcgatgggcggattctcaagtgggaa

SEQ ID NO: 85736 - DNA, 243 bp, Glycine max
  Clone ID: 700953550H1
aaagaaacaggctttatttgagcactttgggactctcaattctcagggttaccttctctatcagcttctgcagattagctggaagaaataaagaaagaaaaagataacaaaagttgttcaaaggccatggatgttgcacattttttgtttggaatctttgggaatgcttccgctctgttcctcttcttggctccagtgatcacattcaagaggattataaagaacagatccacagagaagttc

SEQ ID NO: 85737 - DNA, 243 bp, Glycine max
  Clone ID: 700953551H1
caggggaaaacagtattcacttcctatggtactacgttgtatcagctatttcttttatttaccacatccaataatccagatgtttgggttcctgcatacaagtcgtcacgttggtattgcctgtttttcgtactctttgtgctggtgggagtttactttgttacaaacttgatccttgctagtgaagccgcctcatgccgtttattcccccttagattccactggcaggatagatgatcctga

SEQ ID NO: 85738 - DNA, 239 bp, Glycine max
  Clone ID: 700953552H1
cttcctcttctctctctgcatctccatctcaccaaatacatacatggacaaccgacaccaccaccgtgaattcaccttcttaagctccgcccacttcctcgatcacatagatcctccttctatcaaagaaatggatttcttctcaacttcatcgcctcgtgatcataaaagtaacactagtagccgtgataccaatgatggtcattatgagaatcgtgatgatcaacatgacactcatg

SEQ ID NO: 85739 - DNA, 238 bp, Glycine max
  Clone ID: 700953554H1
gtaggactcttacccttcttcagtttttctcattttctggttctgttgttgcagacgctgacatgacaaaacacgcttcttcctaatcaatcctctttgctactttgactcaccaatataaatatcaattataaattgccgcgtccattgcttcatttcactctttctcttctcacatagggtcatgagctccggcgtgcgctcgtgtccgccgtcggacagggcggcgctgctggca

SEQ ID NO: 85740 - DNA, 236 bp, Glycine max
  Clone ID: 700953555H1
tattttcttgtcgttgagaagcttcgcgaacgaaagcaaagaaccctagaccgtcacagaaccattccatagccatgtctggtgttggccctctttctcaggattgggaacctgtcgtcctccgcaagaaggctcccaccgccgccgccaagaaggacgagaaagccgtcaacgccgcccgccgctctggcgccgaaatcgaaaccctaaaaaagtataatgctgggacaaacaaa

SEQ ID NO: 85741 - DNA, 236 bp, Glycine max
  Clone ID: 700953556H1
gggttttctcgctttttgcagataagcatcaataggatactagatcatggattggtactatgggaacggcattaatgattatctggttcccagagatcaggatttattggacaggcatccttcaccagactattggtcaaactggggaataagtgcaactgaaggttttaattcacctaaaaatctttttatcatggatttctttgaagaaagattcaataatcaaattgagcttg

SEQ ID NO: 85742 - DNA, 234 bp, Glycine max
  Clone ID: 700953558H1
gaaaccagatgaacctgtattagattggtacagcagaatgaaaatagcatcaaatgcggcgaaaggactatggtacttgcacgacaaggccaatccttcagtcatataccgggacttgaaatccgccaacatcttgctggataatgataacaatgcaaaactatctgattatggactggccaaacttgctggtaaagataagacgaacatcgtaccaacaagagttatgggaaa

SEQ ID NO: 85743 - DNA, 207 bp, Glycine max
  Clone ID: 700953559H1
cgtggagatcgaatcctctagccctctcaactcatatttcccacgtagttcgtcggtcaaaccaacgattctcttctcaaagtaatagagagatctttttctggttagacttctatcaatgcaatgaaagaaccatcccttcctatttctttgtcctgtcagaaatagaataagacccaaaagagcccttctttaccactttagggg

SEQ ID NO: 85744 - DNA, 238 bp, Glycine max
  Clone ID: 700953561H1
tctcgagccgattcggctcgagctcttttgggaattactcgaatgacgcattgcagtatcctagtgatgccctcatgcaaagatactatggatttgtctgctgctgcaacaactgcctcccccgtctttgttgctgctccagcagagaaaggccattttcttatagactttctcatgggaggtgtttcagcagctgtctcaaaaactgctgctgctcccattgaacgtgttaagcttt

SEQ ID NO: 85745 - DNA, 236 bp, Glycine max
  Clone ID: 700953562H1
cttcttatagcttcatcccaaaaagctcttttccttctaaatttgattccttagttcagcattctattattatatatggcttcttcaccttcctcagaaaacaaaaacctagagggagtagctggtggtgccggagagaaacccattccacttggtgagaacgttctgcagaagcatgctgcattctttgacttgaataaagatggtgtcatctacccatgggagacttttaaagg

SEQ ID NO: 85746 - DNA, 235 bp, Glycine max
  Clone ID: 700953563H1
ggaggggatttaatctgttgtgatggctgtccatcaacatttcatcagacatgcttggatatacagatgcttcctcctggtgaatggcattgtcaaaatttacaggtgcaatttggacaatgccattcaccaggaggaagcatctatatatccaagcagctctgatgaatggcattgtccaaattgcacctgtaaattttgtggcatagccagtggaacttctgataaagatgat

SEQ ID NO: 85747 - DNA, 180 bp, Glycine max
  Clone ID: 700953565H1
aagccatagaaattaagtgttcatagaagacattgattagaaagtatatataccaaggggaagcagcaaaagaagcagcaccttaggaccagttgcaatcaacagttaagtggtatcttgaggaactccatgtttggagccagaaaaaggccaagatgctgggcctcttgtacatgattg

SEQ ID NO: 85748 - DNA, 241 bp, Glycine max
  Clone ID: 700953566H1
ccttgcttattgaaggtaaccatgttcgattaagtggtcaggatgttgaaagaggaacttttagtcaccgccatgctgtagttcacgatcagacaacaggagagaaatattgtcccctggacaatgttataatgaaccaagatgaagagatgtttaccgttagcaatagttcactttctgagattggggacctaaaacggattatccaaacccaattgggaatcccggttcacaaccaaac

SEQ ID NO: 85749 - DNA, 178 bp, Glycine max
  Clone ID: 700953567H1
caatttgctcacttttagttttctctgtctctcattccaaccagctagttggttattctttccaccggtagttgccaaatcttcggtggttaaacgcgtcgttcacacggaagctctatcttagaccttgacgtcaaactagctcattcccttccaaactgttcattctctttcattg

SEQ ID NO: 85750 - DNA, 76 bp, Glycine max
  Clone ID: 700953568H1
gttcaataacatagagccacgtggttggcgacaagctaagacatgactacgcggtttcgctgttatctttgttcca

SEQ ID NO: 85751 - DNA, 236 bp, Glycine max
  Clone ID: 700953569H1
caaatcatacagtgaagatgatatccataagagcatcaagtacaacgtgtgggcgagtaatcctaactggtgtgacatgcttcaatttgcattccctctctgtagcagcagcatcagtgatggaacgtgctcgcaggctagcaaaccgcgccattctgaggcgtctggtttcagaggcaaagcagcatcagaagaatgaatccgtgctgcactcttccaccacccccatgctgctc

SEQ ID NO: 85752 - DNA, 76 bp, Glycine max
  Clone ID: 700953570H1
ctcaaccacttcacttttccaatcatcgtattctatcatcaccagcgtttggaacccacgctgcattaacaaacca

SEQ ID NO: 85753 - DNA, 216 bp, Glycine max
  Clone ID: 700953571H1
aaagtgcttgtcaagtagtatctgccactgaaattgtctgaaatgaaacattctgatcattagataacttatcacattatgcaggcagcagcaacaacaccactctatcaactcgtgagcttcaagccaaagcttcaaactttcccttcaaaatctcaactttgccccttagggacccctttctgcagactaggaatggcttctgtttctgggttt

SEQ ID NO: 85754 - DNA, 232 bp, Glycine max
  Clone ID: 700953572H1
tgttttttgcttcattgtttttcgatcttatttgaaagtagcttttaaagcacatcacgttgattagaagcatgtttcttgaaaaggggataaatatactatgtttgggtaccttgtggaaatgttatcatgtttggtatagagctattgcactactttactttggatcggcagaaatgttgaggctcaagttcctggtactatcttctggcactcaagaaaagagttagct

SEQ ID NO: 85755 - DNA, 233 bp, Glycine max
  Clone ID: 700953573H1
cggcaattccgatgaccactcccgaccgtcgttgatcggcgaaaacatcgccgccttccacggcttctccggcggggcaggcactgcctccaccgccgcccctcgccttcactataacctctggggtccggtggttgatcagccgggaacgccgtctagcagctccggtggaggcggtttccggcggccgagtcagcagggtttgtctctcagtctttcatcacagcaaacaa

SEQ ID NO: 85756 - DNA, 231 bp, Glycine max
  Clone ID: 700953574H1
ttcaaataccctttaacattatttttaatattcacactgaaaaaaggtaataaaaaaagaagctttttttccttgagcatcacaatcggacacagaccctcttaagaaaaaggaaaaaaaagccttatgtgaatgtgacaatggaagctaagcctcttcgaactgttccctcttcacacaacacttctggtttctcactttctcttccactctctcttctttagcccatca

SEQ ID NO: 85757 - DNA, 227 bp, Glycine max
  Clone ID: 700953576H1
ggaaggtctcctcctaaaatgattgaaggccctgatggtagaagcttgcagctgaaatttaggtcccggttgtctcttcccctattcacaggaggaaaagtggaaggcgagcagggggctccaatacatgttgttctgattgatgccaatagtggaagcattgtaacatctggacctgaatcctgtgttaaacttgatgttgttgtccttgaaggtgattttaacaa

SEQ ID NO: 85758 - DNA, 232 bp, Glycine max
  Clone ID: 700953577H1
ggaactgttgatggcagtaccgctcaactacgagatgcttgaaagtagttgcttttactgtatttattgatattgggttagtgttccgtgtaccgcaccgagccttaataggttgtttgagattctgtaagtaactactccgtgcttcaattggtcaaagtaaatgaaatgaaacgttgatatcaatcactttgtatataagaaatcattagcaaaaatcttaagaaaagaa

SEQ ID NO: 85759 - DNA, 235 bp, Glycine max
  Clone ID: 700953579H1
gtttatttttttcttcctttttctctttttataatatcagcccccaaactcccttgtgtacagtgatcgatctcaagaagaaagactcaaaaaatggaggggaatctagagaagaagttgctgagcaaagaggaagtgtcagaagaagataatttatcattggtgaagagggtgtgggaagagagcaaagagatgtggatagtggcagcaccagccatattcacaaggtttacga

SEQ ID NO: 85760 - DNA, 221 bp, Glycine max
  Clone ID: 700953580H1
gtacaacgtgcaggtcagagcacccttcagatacttctctaatgttgccattagcaaaagtgaagagtcccttgaattcaaacaagaatggttacaaatgaaggatatgtatcacaatcttagccaaaatcttgaagaggtgacaagcaaaacaattccattccaacttgatggagaatatgcagttttctcaaatacagagcaaagaaatcatccaacca

SEQ ID NO: 85761 - DNA, 179 bp, Glycine max
  Clone ID: 700953581H1
aggaggaacaaccatgttccctggtattgctgacagaatgagcaaggaaatttctgcattggcacccagcagcatgaagatcaaggttgtagcaccacctgagagaaaatacagtgtctggatcggtggttctatcttggcatctcttagcacctttcagcagatgtggattgcaaagg

SEQ ID NO: 85762 - DNA, 249 bp, Glycine max
  Clone ID: 700953582H1
tcttgatggattatgatgcattgaaggctgttgggacagggttggggactgcagctgtaattgtgatggataaatctacggatgttgtggatgctattgcaaggctttcctatttctacaagcatgaaagctgtgggcagtgcaccccatgcagagaggggactggttggctttggacgatcatggaaagaatgaaagttgggaatgccaagttagaagaaattggtatgcttcaggagttgactactc

SEQ ID NO: 85763 - DNA, 176 bp, Glycine max
  Clone ID: 700953583H1
gaaatcttaagacttccttttgcgctgatcaatcaaggtcttctcaggcaaatgatgttcgcaagcaaatcgatggcagcgctgttccagtacatacagaacgttagttatcgccgcggatacgtactcatcatgctggtgggagtatactttgttacaaacttgatccttgctgt

SEQ ID NO: 85764 - DNA, 236 bp, Glycine max
  Clone ID: 700953584H1
ggcggtatgtcccagtcctaacctcatcaatcacagtggaaaggaggatgcagcaaacaactttgcccgtggccactataccattggaaaggagattgttgagctttgcttggaccgcatcagaaagcttgctgacaaatgttcatcgcctcgtgatcatacaaataacactagtagccgtgataccaatgatgatcattatcagaatcgtgatgatcaacatgacactcatgatc

SEQ ID NO: 85765 - DNA, 171 bp, Glycine max
  Clone ID: 700953586H1
cacctcctttccctctacaaataatgttgatgaggagtaacaggtgtcctttcagtttgaacagctttagattctcaaacaattaaggaaatcagttatggctccttctaggaaatctagaagtgtaaataagcaggttcattgcttcatttcagtctttctcttctcaca

SEQ ID NO: 85766 - DNA, 231 bp, Glycine max
  Clone ID: 700953587H1
gaagttgtgctattcaatcccaaagccacagaaataatattattcagattttagagactgaaaacatcatggccaacctcgacctcgacccattccagacaagcatcttaatcctcgtcccaatagcactcctggtggcgttactatctcgtactcgtcgaagagcaccctacccaccaggcccaaagggtttaccaatcataggaaacatgttaatgatggagcagctaa

SEQ ID NO: 85767 - DNA, 228 bp, Glycine max
  Clone ID: 700953589H1
aaacacatacattgtagtatcacttttgtctcggaatttgttcttttgagttatggcaagcttaaaagttgcatgtgtggttttgatgtgcatggctgtgatgagtgcaccaatgatggtgcaagccgtgtcatgcaatgatgtttctgtgaacctagcaccgtgcctatcttacctgatgcagggtggagatgttccagaatcgtgctgtagcggagtgaggaacat

SEQ ID NO: 85768 - DNA, 225 bp, Glycine max
  Clone ID: 700953591H1
ctataggacaaaagagaacaaacaaaaacattggatggcaacgacaactagaacaactttcctcaaacgacgcagcatttccgcttccgccgaatctccctccagctacaggatccgcttctctccgataatggactccaacgagtccttcccttccagcttccccaagtttaactccgacctcaccgcgggcctcttaaacccaatgttcccacctcccgacaa

SEQ ID NO: 85769 - DNA, 232 bp, Glycine max
  Clone ID: 700953595H1
atccatataggcatagccgcataggccaagtcacacaaataacacaacacaaacacaaaccttcaaaagccacaaaacacacacttccgatcgaagagacaccgcgtcaattaagctactgacttctgagtaatgcatggacggcagagataggaattgttttggctattaaattactttcttttgaggtttatgactgtgttgggttttcactatgagtggtgttcctaag

SEQ ID NO: 85770 - DNA, 234 bp, Glycine max
  Clone ID: 700953596H1
gaaaatgattgatagcaataacaatgtcaacatgagccaccacaatcctaatttcacaggaacaaaggaagttgttgttgaagacgaggaatcaccattgttggcgttgccactgctaagaaacagagaggaagatgaacaagggtcagggtcaaaggcatcggttactggttctgtgttcaatctctcaacaaccatcatcggcgccggaatcatggccttacctgcagccat

SEQ ID NO: 85771 - DNA, 262 bp, Glycine max
  Clone ID: 700953601H1
attttgcatgagattgaggaggaacccagagccaagatggcacttgacacttgcaagcaactcatggatctttctattggggaattaacaaggtcacttgatggaataaatgagtttaacctcataaatgttgacaaaatcctcatgaatttaaaagtttggcttagtggtgcggttacataccaagatacttgcttggatgggtttgagaacaccactagtgatgctggcaaaaagatgaaggatttgttgacgataggca

SEQ ID NO: 85772 - DNA, 275 bp, Glycine max
  Clone ID: 700953602H1
cacgcgtacggctcgacgaaatataaggttggcaacctggaattccagagggagcagctctttgggatgaagagtgggataaatttgaggatgaaggatttgctaatgatctcacttttgcatcttcaaaaccgaatcctgcatttattgatggagaacaaaatttatctgatgataattctgttcatggttcacctgtgaatgcaaatgggaagcaagaaaattctgctaatggtgattatacagttgaggatgaatcctatgcacacagtgaa

SEQ ID NO: 85773 - DNA, 272 bp, Glycine max
  Clone ID: 700953603H1
gcgtacggctcgcgcacccttctttgactgttctcccacaccacacccatgacactcctcctgctccttattctcctctttcacgcggcggaagcccagggacagtggcagctcctccacaaaaacatcggcattgtcgccatgcacatgcagcttctccacaacgaccgcgtcatcatcttcgaccgcaccgacttcggactctccaacctaaccctccccgacggaagatgccgcaacaacccaaacgagttggtcgtcaaacgcgactg

SEQ ID NO: 85774 - DNA, 253 bp, Glycine max
  Clone ID: 700953604H1
gatctgcctcctttttatcaaatctatctcttcttcaagaatagttgaaaatggggctgtctttcaccaagttgttcagccgactgtttgccaagaaagagatgcgtatactgatggtgggtctcgatgctgcgggtaagaccaccattctgtacaagctcaagcttggagagattgtcaccaccattcccaccattgggtttaatgtggaaactgtggaatataagaacatcagcttcactgtctgggatgt

SEQ ID NO: 85775 - DNA, 177 bp, Glycine max
  Clone ID: 700953605H1
cgagaatccctccctttctggctttctctctctaaaactatcatgccctccaccgcggctcccgtccttcccatatccaatccccaaaccaccgccgcacccggggcgctatcgaggctccggcgaacaacccggccttccgcgtcttcatcaacaccctctccgcgtctctccgac

SEQ ID NO: 85776 - DNA, 257 bp, Glycine max
  Clone ID: 700953606H1
gtaaagttgaagatgtggatgaagataaggagaaggaggagaagaaaaagaagaccattaaggaggtatctcatgagtggtcattggtgaacaagcagaagcctatttggatgaggaaacctgaagagatcacaaaagaagaatatgctgctttctacaagagtcttaccaatgattgggaagagcatttggctgttaagcacttttctgttgagggtcagctggagtttaaggctgtcctctttatccccaagagg

SEQ ID NO: 85777 - DNA, 257 bp, Glycine max
  Clone ID: 700953607H1
cattcattcactccaaggagggatctctctctctcactccttcttctctctcctctggcacccctaaagcttcttctgttctgtgcaggcagtttttctttggtttggttgcatcctttgatctgatcagcaaatttgagaattcagtttgggaagggccattcctctttagtgcaaaacagatcgcaggtgcctttgtgctgatggccactaatgaaaatcttccaccaaatgtaattaagcaacttgccaaggag

SEQ ID NO: 85778 - DNA, 259 bp, Glycine max
  Clone ID: 700953608H1
cctcgagccgattcggctcgagaaacaaatcaagaaatgtttcagactcagaagcattgtgaccgcctaagcctcaccaaattcactgatttggacacttcatcatcggatgacaatgatcaaaatagcactggcagggaactcaacaaggacaatgactccatggagaagaggagaaagagggtgagtggaagaagctggaaggtgaagataaaggacttcattgactcacagatgaggaagctggtggagaagcaag

SEQ ID NO: 85779 - DNA, 261 bp, Glycine max
  Clone ID: 700953612H1
aaaccctagtctccatacatcaacttgggaggttaaagagacggcaacgttgtgctgtccgccttgaccgagccagagcttcgtcttggccctcgattttgccctgtaaaactaatcccagtcacaacagaaataatcaatggcaccgaaacagaccaaggctgagaagaagatcgcttacgatgcgaactgtgcgacctaatggaggagtacggccaaatcctcgttgtaaactccgacaacgtgggatcgaaccagctc

SEQ ID NO: 85780 - DNA, 246 bp, Glycine max
  Clone ID: 700953613H1
cttcataggacttctaatgaagtctatttttttttgtttttcttatttgggtgtgggagttttgttcaaagtttgagttttaatgcttgcactggaaatgagccattgtcaagagtttatgtttccttaacgacataaaattctttttaccggtaccattatgattgcaaagataatgttttgggtctcgaacatgagacattcaaaaaaaagaggaaaaaaaaaaaaaaaaaaaaaaaagaggga

SEQ ID NO: 85781 - DNA, 267 bp, Glycine max
  Clone ID: 700953615H1
aaaggctcggataatacatctgatttggaaatgtggagcagctcagaaagtgaccataagcaactctctggagataagggtgctgatgataagccgcagaagtcccagaagcctaacaaaaatgtattgtcagcagccaaaattgcgaagaagatgaagttaaaatttactaaagcatggattgcatatcttagattgcctcttccacatgatgtttacaaagaggttcttgtttgtcttcaccaagcagttattcctcatctatct

SEQ ID NO: 85782 - DNA, 267 bp, Glycine max
  Clone ID: 700953616H1
ctctcatttttcatctcacccttcctctatttccatcctttcgtgacaacaacaacataaccctctcgcccccaacacacacctcttctttttaagggtttatcttaaaccaggatttttggcactaatttctctatgggagaagcaccagcattgcttgttgatgacgtgcaggatggggctctgaatggccttgaattgaaaaatggaacttgcaaaacaactgctactgttggcgataagatgtatgtcattggtggagctgat

SEQ ID NO: 85783 - DNA, 257 bp, Glycine max
  Clone ID: 700953617H1
atttactgttgccctgtgttattcttattggattttcatagtgggtacattgattattctgatctgctattgagaacttttgggggatgtaactgggaaggtattaacatactctgctcaagacagcatatacaaggtatttgacctaaaaaactatacaatgctgtactctatttctgataaaaatgtccaagagattaagatcaggtaatttttcttaccgtgcttgtattatttttacttttagaaaacacttc

SEQ ID NO: 85784 - DNA, 254 bp, Glycine max
  unsure (1)..(254): unsure at all n locations
  Clone ID: 700953619H1
ctcttttcgttctctccaatttcccgaaaccctaatttcctcaatcctggttttggaattcgacaatggagcagaagaggagcagcaagatgtacaacctgttcgtgaagcacttggacgggaaaaccctaaccctcctattcccctctccgatcctctacgcgagttccatcaaggatcgcctcttccaactcactggaatccccgcccaccaccagcgcctcgtcaccggctgtcnagcactcaacgatgac

SEQ ID NO: 85785 - DNA, 256 bp, Glycine max
  Clone ID: 700953621H1
ggcgcgcattaaagcggtgcgtcttttattatatataaaactctccccagttttcaagttccactactcagcagcacagcagcaacaacaacaataacaagcagagtcatagagagataaaggggctgcttaaattttcagccttttggagaaagagacattactcacatactcactcaccaccgagatccatttttttgcgaagaaagttgaagaaaaaaatggaaacaatgttgcctccgaaccaagcagagga

SEQ ID NO: 85786 - DNA, 254 bp, Glycine max
  Clone ID: 700953622H1
aaaattaatgcccctttcattttctctgcatctgtagtatctatcaccaatcaattccactcttcttcccatcaaacaacaaaaaatcaatctgggaaacaaaaacaaaatgccgtcattagaggaggaactcttcccatcaaccccaggaaagttcaagatcgagcggtcccaccacatgaaccgccaactctatcgctgtttcgcctccaccagcaccatgttcctgtgggccctcttcttaatcgccctca

SEQ ID NO: 85787 - DNA, 251 bp, Glycine max
  Clone ID: 700953623H1
atgattttgcgttgctaataagtgtccttaggatattagtttaagaattaaaaaaaaaaaaaatttattttgtgaatcataagaaaatgaaaaaaaaaatcatgagaaacataattttgtgcctccaaataaagatatttctactttaaattttttaagaaatatacttaaggtattggttagtatttcccttatctatatatgccatcatgccagccatgtgacttgttgacattggtatagtttggtgt

SEQ ID NO: 85788 - DNA, 258 bp, Glycine max
  Clone ID: 700953624H1
gcacaaccaacacctccacagcctctcctacctcccggagccatggccgccgccgactcctccgccgctccatcgcaccagttgtcgcagagggagacggacatccagatgatgctcgccgccgacgttcacctcggcaccaaaaactgcgactttcagatggaacgctacgtcttcaagcgcagaaccgatggtatttacataattaaccttggcaagacatgggagaagctccagctcgctgctaggattattgtt

SEQ ID NO: 85789 - DNA, 259 bp, Glycine max
  Clone ID: 700953625H1
cgatgccaaacgtagcgccagagactcccacgtccccattttggcacccttgccaattgggttcgctgtgttcttggttcacttggcaaccatccccatcaccggaactggtatcaaccctgctcgtagtcttggtgctgctatcatcttacaacaaggaccttggttgggatgaacactggatcttctgggtgggaccattcatcggtgcagctcttgcagcactctaccaccaggtcgtaatcagggccattccctt

SEQ ID NO: 85790 - DNA, 259 bp, Glycine max
  Clone ID: 700953626H1
aagcacacaaacaaagtttaattgctactttatatgctcatggctgcttcaagtaacacaacagtgagttatatgtgacagaagacaaagaccaaagttcttctgaaagttctgtatggtctctccaggttcaaggtagccaataatgggtatcaagtgcatacacgtttttgatagattatatagttttttcacttgttcgaagaaaagcaccatgccaagtggcagaagaattttccacagggatgtggaaaaggaa

SEQ ID NO: 85791 - DNA, 260 bp, Glycine max
  Clone ID: 700953627H1
tctgctcagagcctcattaagtttttctctctttcacttatttattgactctccataagcccttcaaacctctctctattcctctctactagtcaccttctcccttccattcactccacttcttaacacccccaaacagaacaacggcagagcaagcagccagaaaaatggtgttgctgtccaaagcaacaacagaacaatactcctacatcaagaactacatgccaactgcattctcctcaacaattcccatagtggac

SEQ ID NO: 85792 - DNA, 186 bp, Glycine max
  Clone ID: 700953628H1
accaaatcaaagacacctgagccattcaattcccctcctttattgctttcaagtttcaacactaattttattatctgaaaaaatggctttcaaagtttcgtttttccttgcacttgttctagtttccaatatcctcctccttgatacaacagctgctggacgcagcattggcgaaaactccaactc

SEQ ID NO: 85793 - DNA, 263 bp, Glycine max
  Clone ID: 700953629H1
ggcagactagtatccgatcctctgtcctctcgaagctttcatcgttcaacatattctcaccatctcagtcatgggcctgctatcttgttttaggtctaccgtcctgagaaaatgttccaaaggaagctctggcatgtcaagattcctgtatacgaacaattttcaacgaaacttgatttcgtctggtggcaatgaatcgtattatgggtattttaacaggagatcatacacttcactttatatgggaactggaactgtgggtg

SEQ ID NO: 85794 - DNA, 265 bp, Glycine max
  Clone ID: 700953631H1
tgaagttttattacatcatataaaattttagcgggatatttaaaattttgtcttgtcatcatattaattttaatgacattttaaattctgcccctctccactcagaccattggtaattgtgtgaatttttctggataggtgggttattgtgctgaagtttataaagtttagtactttgaaagttgaaacagatatgttgtgtggttgagaaaaagcaagatctggctgacacaattgggctgaatacaatgttagcttctaggta

SEQ ID NO: 85795 - DNA, 266 bp, Glycine max
  Clone ID: 700953632H1
attgatttcattttcggatactccaccaccttgatccaaaactcgaagatcttgctgatttgccatgggcttcctcaccagaacatagtggtggcagatggcacagggcagaagaacatgcccacaggaatagtcctccataactgcgagatcatgccggaccctaccctcttggcagaccgcttgagcgtgaagacttacttggccaggccatggaaggcattctcaagggcagtgttcatcgagaatgttatcggggacttgat

SEQ ID NO: 85796 - DNA, 250 bp, Glycine max
  Clone ID: 700953634H1
cttcttcctccaagagaagtaaacaaccctcacattcaccacagcagcacacacagacaaagacaaccttgtttgtctccaatcaaaacctttcaagctggcgttcgaaaaccaagacaaccctgtccgagaaatcaagcccaagaataggagaatcatgggtgctggaggccctgatgatgaggacaccaacaggtggccaccgtggctgaagcctctgctaaaagacagtttctttgttcaatgcaag

SEQ ID NO: 85797 - DNA, 252 bp, Glycine max
  Clone ID: 700953635H1
ctctctgaagatggcttcacgcaggctcgtatcttctctgattcgatcctcccttcgtagatctcaatcgaagccctcaatttccgcatcgacatcgaggctcacgtcatccaaccgtgcctcaccgcacggatacttgctgaaccgcgtcgccgagtacgccaccgccgcggctgctgctaccactcctccctctcctcctcctccggggaagaaggagctcggcggcggcgggaagatcaccgatgaatt

SEQ ID NO: 85798 - DNA, 252 bp, Glycine max
  Clone ID: 700953637H1
gtgagagtgaagcgcgaagcgagaagcgacatggatccagacgcgttggcaaaggcattcgtggagcactactactccaccttcgacaccaaccgcaacaatctcgccaatctctaccaggaaggttccatgctctctttcgagggtcagaagatccagggctcccacaacatcgtcgccaaactcacctcccttcccttccaacagtgccagcactccatcaccaccgtcgattctcagccctcaggcgtc

SEQ ID NO: 85799 - DNA, 253 bp, Glycine max
  Clone ID: 700953638H1
gtttctctcccctgctatctctaaattgaacgtgttttctgctacttttgcgcgtgtgcattcctcttcccttcaaagctagcactttacccaccaccacaacaaccccttttgctcccacgtgcacagagtcaaacccaaagctcttcttttctctccaaacccataacaacaaaaacagagcttctctgttttctccattcccaaaacacaaaatagaataaaaacggaatcttcttcacgcataattctg

SEQ ID NO: 85800 - DNA, 249 bp, Glycine max
  Clone ID: 700953639H1
ctatgacaaagatttcagatcagatataattgaatctattctatgtgggtccctgtttccatcagagttttcaatcaatgatatagttaaacgttgggttgagattttctctggatttgataaagtggaggtcaaggctcttgaaaagatacttgagcaaaaacaaaggttacaggaagagatgcaaaagtatctagttctgaggcagactagtcaggaaaaagacattcctgaggcccaaaaaaagat

SEQ ID NO: 85801 - DNA, 253 bp, Glycine max
  Clone ID: 700953640H1
aaaaagcaagagttaccactcagtctgtactatccacttacggttcccaacatatgaacaacaacgccgccatgtagaacacaaccgcttcctttttcttcttcagaaactcttctctttctcattttcctcttctttgaattcaaagggctctagatggatacagctgaccaaagaaaaggcaagtatgctcctaccagggatacagagaacccactgttgggaaaatttgacaagccgcttccatgttttg

SEQ ID NO: 85802 - DNA, 253 bp, Glycine max
  Clone ID: 700953641H1
atttccctacctctcccttcaagatgcagatcttcgtcaagaccctcaccggcaagaccatcacccttgaggtggaaagctctgacaccatcgacaacgtcaaggccaagatccaggacaaggaaggaatccccccggaccagcaacgtctcattttcgccggaaagcaacttgaggacggccgtacccttgctgactacaacattcagaaggagagtactcttcacctcgtcctccgtctccgtggtggcat

SEQ ID NO: 85803 - DNA, 254 bp, Glycine max
  Clone ID: 700953642H1
gaaactcacagaagaaacactgacagagaagagacagttgcagcaactcctttcaatatgtgcagctgaaaggacaacagaagagacggccatgaatgaaactagctccagatctcaccaaattcttagattgacagttgaaagtaatcctcgtgattatgcagacaccgcaagatccggagctctatttgccagtgtgaattttgttgatctagcaggaagtgagcgtgcttctcaagcaatgtcagcaggca

SEQ ID NO: 85804 - DNA, 256 bp, Glycine max
  Clone ID: 700953644H1
gagagagcgagcagtttcagacacagagagaggggtttgggattggagggattgacgctgcgtctcttcctcttctctttcgatccatccctcattcctaatcctccaatccaaccacctcagcctcacactcacatatacacatatctgaacgcgtatcgtccctcctatggcttcaaagcgcatcctcaaggagctcaaggacttgcagaaagacgcaccaacttcttgcagcgctggtccagtagctgaggac

SEQ ID NO: 85805 - DNA, 257 bp, Glycine max
  Clone ID: 700953645H1
agccaccaagagcagccactgttagagaactcgttcatagaagaagacgagccgcaagaaacagcttatgattcgtcggagaagatagtggtggtcggagtcgacgagtccgatgacgaggagaattgggggagagtgccccgattctcgtggaagaagctatggctgttcaccgggccgggctttctgatgagcatagcgtttctggaccctggaaacttagagggggaccttcaggcgggtgccattgcagggta

SEQ ID NO: 85806 - DNA, 259 bp, Glycine max
  Clone ID: 700953646H1
gttcccaaattcattttaatcctaattctgcacttcttgatcattcgatttttctcctcaagatgcagatattcgtaaaaactttgaccggcaagaccatcacccttgaggtggaatcctccgacaccattgacaacgtaaaagctaagattcaagacaaggaagggatcccacctgaccagcagagacttatctttgcgggtaaacaacttgaggatggtcgcacccttgccgattacaacatccaaaaggaatcaac

SEQ ID NO: 85807 - DNA, 68 bp, Glycine max
  Clone ID: 700953647H1
atttcgtttaggttttcaattttgaagcatcgttcgaataatactctttcccaaattctctctctctc

SEQ ID NO: 85808 - DNA, 263 bp, Glycine max
  Clone ID: 700953648H1
cgctcttcaacaattgaaaatagttcaccctgccgccccaacccaacatcgtctttctctctccaatatctctaccctaatccaccctttctgaacaaaaataaaaaaataaaaaaaaacccatcgatttcttggacctccatgacttctttgtctacccatcacacctatagccgaaagcaaaaatctctcggcctcctctgcaccaattttctgagtttgtacaacaaagaaggtgtgcgcctggtcggtctcgatgacgc

SEQ ID NO: 85809 - DNA, 250 bp, Glycine max
  Clone ID: 700953649H1
tgttttgttaaagttcacttagaaatccttcgccctctcataattttatctccaatggcattgggaagcataatgcacttccttcaagataagaccattttagtcactggtgccactggcttcctcgcaaaaatttttgtggaaaaaatattgagagttcaaccacatgtgaagaacctttaccttcttttgagagccagagatactgactctgctactcaacgtttacatactgagatcatagggcagg

SEQ ID NO: 85810 - DNA, 251 bp, Glycine max
  Clone ID: 700953650H1
ctcacacttgacaaagaggaggcaccatgacaagcactcttctgtctttgctcttcttgctcttctctcttctcactccaactctaatttcctcttcaccagttctaaaccctcaagaggtcgtacaagaggtcaacaagaaaatcaatggctctatagcaagacccagaaggaacttgggctacctctcatgtggtagtggcaaccccatcgatgattgttggacgtgtgaccccaactgggagcagaac

SEQ ID NO: 85811 - DNA, 249 bp, Glycine max
  Clone ID: 700953651H1
atcgagataactagaaacagtgtgatgaaaatgaaggtccttgttttcttcgttgctacaattttggtagcatggcaatgccatgcgtacgatatgttccctctccgaatgaacactggctatggtgcccgtactccggaggtgaaatgcgcaagttggaggcttgctgtggaagcacacaagctctttggctttgagaccattcctgaagagtgcgttgaagcaacaaaggaatacatccatggcgaa

SEQ ID NO: 85812 - DNA, 248 bp, Glycine max
  Clone ID: 700953652H1
cccatctagaatcccttgacttttggaacgctcttaattctttctttctctctctgcctctcatttaaaatctttgtcaccaagaaattaatagcatcaccccaccgtttgagccaaactctgacgtccttcaacacattacataactctgcaccctcctctgttttcaaacacatatatacatcttttcctaaaaataaaaaacagaacaagaaacagagaacatagcaccctcctctgttttgaaa

SEQ ID NO: 85813 - DNA, 250 bp, Glycine max
  Clone ID: 700953654H1
aaaaaaagtcttaatttgtttcttgttcttcttcttctctctgtcgtttgttctcttgatctttgatctctgtgttatatgttgtagcaaaagaagtaaacaacacacacatatataaatatttgtaagatatatatatatatatatatgctcatgggttttcttcacaagctttgggacgaaacgctggcgggtccggcaccggaaacgggtctggggaagctccgaaagtacaattcgttctccggcg

SEQ ID NO: 85814 - DNA, 248 bp, Glycine max
  Clone ID: 700953655H1
aaaaaacagtggcacccaaaccaaacggaacctcgtcggatacaaaattcccaacatatttgtttttcttcattttccaccttaataataataataatacctcctgttgttgttattattaatattatttttcttttttgggtcggtttagattttagaatccttaccatgataaaaactcctacaaaatctcaccagtttcgaacctaacacacttatgacttatcccatatttcgtatttatctcg

SEQ ID NO: 85815 - DNA, 251 bp, Glycine max
  Clone ID: 700953658H1
cgttttctttgaaacgcacagcttcaatcaccgaccacaccacccatcaacgacatgcttcctctttcccttctcaagactgcccaaggccaccctatgttggtggaactgaaaaatggggagacatataacgggcatttggttaattgcgacacatggatgaacatccatctgcgagaagtcatttgtacatctaaagacggagatagattttggaggatgcctgaatgctacatacgaggcaatacaat

SEQ ID NO: 85816 - DNA, 254 bp, Glycine max
  Clone ID: 700953659H1
gaaagagaagggagctatagccataaggagaaaaactttcaaagaggtgaaagcaaaagagttcttcttttccttttttatatatacttgggtgctaagctgtgtgagttcattgacaagcctgaaatggcaactatgctgacaaaggagcatggtctgaacctcaaggagaccgagctttgcctcggtttgcctggtgggggaggcggcggcggcggcggtggtgaggtggaaactccaagggccactgggaa

SEQ ID NO: 85817 - DNA, 170 bp, Glycine max
  Clone ID: 700953660H1
ggcggcggcggcggtggcgcctcctccgccggcggtgagcttgatgaacccgacggagaattcggtgaagttcgcgcctcctccttctttggctccttcgcatagtgaagagaaagagagcaaaagcaaatcgtcttgccataatgggttgtgtaagcaaaacatgggag

SEQ ID NO: 85818 - DNA, 259 bp, Glycine max
  Clone ID: 700953661H1
gcaaagctccctccaggctcaatggggtggccgtacataggagaaacccttcaactctattcccaagacccaaatgcctacttttccaccaaacataaaaggtatggcgaaatattcaagaccaacatcttgggttgcccctgtgtgatgctgacaagccctgaggctgcacgctttgtgctagtgactcaagctcacttgttcagaccaacatacccgaaaagcaaggagcgtttgattggtccttttgctctgtttt

SEQ ID NO: 85819 - DNA, 262 bp, Glycine max
  Clone ID: 700953662H1
aatttaccttcatctttctctcagcttcaccttcaccttcaccttccgaattgtatcaaacctcaaaaaatggatcatcaaaacaaacacgtagcagtctttgctttcccctttggcagccaccttatgcctctcttaaaccttgtcctcaaactagctcattcccttccaaactgttcattctctttcattggcacacacaaatccaatgcaatccttttcccaaaaccccacatcccaaataacatcaaggcctatagca

SEQ ID NO: 85820 - DNA, 261 bp, Glycine max
  Clone ID: 700953663H1
atggcggcttgtctgcaactgtggcaatgcaaactagcgagaccctttgactcattaccggtgcgaaggtcaattcctttgagtctgaggtgttcggccgcgccctcttcttccaagccgacgcgctcctacagcatcactctcatccccggcgacggcatcggccccgaaatcatctcggtggccaaagacgttcttgtcctcgccggttatctcgaagggattaaatacgacttccgcgagatgcttatgggtggagct

SEQ ID NO: 85821 - DNA, 261 bp, Glycine max
  Clone ID: 700953664H1
cctcgtccttcgctgcaccatcttcgtcaacctctggtccttcgataacgattgccgtataggattccctcatcgaagatactaaccgcatcctcgccgagatccgatccgacgccgacccctccgatcccgacgaccagcaattcttcaaccctaacgacaccttcaccctcggccccaagatcgataattgggacactgagcgcaagaattggcttcaccaaaaccccgaataccctaatgtcatcggaggtaaacctc

SEQ ID NO: 85822 - DNA, 250 bp, Glycine max
  Clone ID: 700953666H1
aaaaaagcaagagagaaaggaagattaagatcgtgtctattttgcaatcaaaatcccttctaacttctccgttgatgtatgtatattttgttcacagagcaaaccccacaatccacatgataatgataatgatggcgatgtctttctctctctcttttcctctcacactcttcccatctattccctcatggtttcttctctcttccttcccaataaaaattacccacttctaatcagacaaaaagtagag

SEQ ID NO: 85823 - DNA, 243 bp, Glycine max
  Clone ID: 700953667H1
cactgatgctggtggcataatcctactgttccaagatgacaaggttagtggattgcagcttctcaaggatgatcagtggatcgatgtcccaccaatgcgtcactccattgtaatcaaccttggtgaccaacttgaggtcataaccaatggcaagtacaagagtgtcatgcaccgagtgattgcccaagccgatgataccagaatgtccatagcttctttctacaaccctggtgatgatgctgt

SEQ ID NO: 85824 - DNA, 243 bp, Glycine max
  Clone ID: 700953668H1
gttaagggctgcactataccagaatgtctcagggaagaggcagtgcatctttgcctattgtggtcactgtggtttcactactgtgccttttggaacgtgctaacgcagcaacttactccgttggaggacctgggggatggaccttcaacactaatgcttggcccaatggaaaaagattcagagctggtgatatcctaatcttcaactatgactcaacgacccacaatgtggttgctgtggaca

SEQ ID NO: 85825 - DNA, 240 bp, Glycine max
  Clone ID: 700953669H1
cccatagcagccatgtaaggagtgtccatgcatttttaggcttctgctctggtgacttttgcttttgtctgatatggtgtataggaaattgagaattgtattactttttgcaaactcacatgtgggcccttcatttttgtctctcactacttcactgattgtatttaaattttacagaatctttaaattgcattgacataataggatgacaaaaacaattgttatgtttaccgtcactaa

SEQ ID NO: 85826 - DNA, 247 bp, Glycine max
  unsure (1)..(247): unsure at all n locations
  Clone ID: 700953670H1
cttctctctgtttcttcttttctctttgtctgaggtccatttttgagcaatggcgagaaaactaagcattgttgtactttgcattgttcaaatgctgcttcttcttgtggaaaacgatgctgagattgttgtgtccaccgtggaggctccagctccgcagcctcacnagaacaccacccacaccctgtccagcgctccagctccgctgcctcacacaaacaccaccaagtcccatgttcccaatttg

SEQ ID NO: 85827 - DNA, 249 bp, Glycine max
  Clone ID: 700953671H1
tgaaactcttccactacctcttctcactactcacactactcttcctcttccaagccaaagaaggagtttccattagccctttgcaattgatcacacacccacttgaccccttaacaaagcaagaaatcaccctcgtccaagccacagtcctaaagaaataccccagaccacccaaccatgtcttcttccactacgtcggcctcgacgatcccgacaagacgcacgtcctaaagtgggcctcctccggca

SEQ ID NO: 85828 - DNA, 247 bp, Glycine max
  Clone ID: 700953672H1
ctcaacggagcacctctcttcaggtcgccatctagactgcaatcatggctgatggaccacagcatccatcagttgttcagaagctagctggacagtcttacctggtgtccaggctaagccccaactttaactctgggacttattcctcgactggttcttacttcactggaggactgcactcttctgggttggctgttgtgtcgcctggatctccagttactgtgcatgctcgcggagagaaaggagt

SEQ ID NO: 85829 - DNA, 250 bp, Glycine max
  Clone ID: 700953674H1
gcagcgcattatagcacaccacacaaaaaagcaaaacagagagaacaactgttactcacacacgccatgggtaaatgaatggtttttgagcaacagcagttaaaagagaaaagggattcagcgaagatgacatcggttggtgtggcaccaacttcgggtttgagagaagccagtgggcatggagcagcagctgcggatagattgccagaggagatgaacgatatgaaaattagggatgatagagaaatgg

SEQ ID NO: 85830 - DNA, 252 bp, Glycine max
  Clone ID: 700953676H1
atcctgaaattaattgaatgtgaaaagttggagatgagcttattatcgtttaagtggcttatatgctgctgctagtatggtgacggactaagcacaatcatgtaactagttactaactattggacccatcttacttaccccatatgtggtagtaataatgaggctatgaatttgcaattgttattgaattgattgtatatggtgtggacttgcaggttgcatcacaaccaaggagcttggaactgttatgcg

SEQ ID NO: 85831 - DNA, 254 bp, Glycine max
  Clone ID: 700953677H1
cacaagaaaaggtggccctttagaaggagcacatgttcacatcgtccacttgtctgattcaagtgcttccttagatctgattaaggaagcaaaaagtcatggtgacagcataagtgttgagacttgtcctcattacttagctttcacgtctgaagagataccaaatggggctactcgttttaagtgttccccacccattcgtgatgcatacaacaaagacaaattatgggaggctgtattagagggacacattg

SEQ ID NO: 85832 - DNA, 260 bp, Glycine max
  Clone ID: 700953679H1
ctcgagccgaatcggctcgagagtcacacaaaaggagcttgatttccctcatttgctggagcctctacgaagacttctaagaggtcaagcctctctatttgaatggtcaagatcaacttcattggcgaggacactgtctccaagagttttagaaaatcaaattgacacaaagaaggagctggaaaagagccttaaagccacttgtgaggagttcatcatgtcagttactaagcttgttgtggatcctttgctttcattcg

SEQ ID NO: 85833 - DNA, 215 bp, Glycine max
  Clone ID: 700953680H1
cacacacaaaagaaacaacactccaagaggaccaccaggtcctccacctcttcctttcatcggcaaccttcaccaactccacaactcatccccacatctctgcctatggcaactcgccaaactccacggtcctctcatgtcgtttcgcctcggcgccgtgcaaaccgtcgtggtttcatcggccagaatcgccgaacaaatcttgaaaacccacg

SEQ ID NO: 85834 - DNA, 244 bp, Glycine max
  Clone ID: 700953681H1
tcgcaagcaaaaagaaagaatcccaggcgaggagaaagatggaggggaaggagcaggatgtgtcgttgggagcgaacaagttccccgagagacagccgattgggacggcggcgcagagccaagacgacggcaaggactaccaggagccggcgccggcgccgctggttgacccgacggagtttacgtcatggtcgttttacagagcagggatagcagagtttgtggccacttttctgtttctcta

SEQ ID NO: 85835 - DNA, 239 bp, Glycine max
  Clone ID: 700953682H1
attccacaacagtgggagggagatccaaaaagagagagtggaaaagatggcgcggttgatcacagtggtgtggtgcgcggtggcggtgctattatgcgccgcggccggtgcgtcgtgggtggaggaggcggcgaacccgatacgaatggtgtctggcgtggaggcggaggtggttcgggtgatcggggagtgccggcgtgcgttgaagtttgctaggttcgtgagcaggttcgggaaga

SEQ ID NO: 85836 - DNA, 244 bp, Glycine max
  Clone ID: 700953683H1
ttcctatcttgttctgattatggaacagctgaagccaagtgctgctaactcttcccctctcactcccctcggcttcttggacagagcagccaccgtccacggcgacgtcccttccgttgtttataacaacaccaccttcacgtggtcccagacgcgccgccgatgcctccagctggcctccgccctctcctcccttggtatccgccgcggcagcgtcgtctccgtcgtggcccccaacatcccc

SEQ ID NO: 85837 - DNA, 246 bp, Glycine max
  Clone ID: 700953686H1
cggctcgagggaatggatctgagcactattgaattggcgaagggctaatgaagcttaatggtttattcacagggagcacgagaagctccagagaactctttacatcattattaagcagtcttatcaaaggtttctttccaagagatgttataagatataattggtaaaattaagtttattgaaagattttgcgaaactttgcctgggatatagtgaaaatggacagatcagatacatcaggctttg

SEQ ID NO: 85838 - DNA, 246 bp, Glycine max
  Clone ID: 700953687H1
gtttctaggtatggaaactctttcatatgggtcagcaccatgctgccaagttgtgaactcaaagtggaaattagttgaaaagagtttgagttcacgtcaatcaagagtttcctctataggaaaacttggagtttattacacaggtactatttctgcatgtgcgcctgtgagattttatgagatgggtactagggtgcagctaagaagctcaacaagattcaatttcaaggtttgtagtggaagtta

SEQ ID NO: 85839 - DNA, 246 bp, Glycine max
  Clone ID: 700953688H1
atcctctgaattcaactcgctcgcacatgggaatttattgaccagcatcaaccagatctgtgactgtgttcgattgggtaccaactattattcaataggctgtcagtaacgtaaaagtaatccctgtgccccagccatggctgcaccgtttttctcaacgccctttcagccttatgtttatcagagtccgcaagatgcaattataccttttcagattttagggggtgaagctcaagtggttcagat

SEQ ID NO: 85840 - DNA, 235 bp, Glycine max
  Clone ID: 700953082H1
ctcttagcgcagatctctcagggcttgcatcttctcaggtaagttgtgaagatgtacacatcaaggaagaaaatccacaaggataaggatgctgaaccaactgagtttgaagagtcagttggacaggcattgtttgatctggaaaataccaaccaggagcttaaaagtgatctgaaggatttatacataaactcagctgtgcaagttgatgtttctgggaaccgcaaggctgttg

SEQ ID NO: 85841 - DNA, 241 bp, Glycine max
  Clone ID: 700953085H1
cacagattgaagcaccgtggtcctgactggagtgggctccaccaatatggtgataactatttggctcatcaacggttagccatagttgatccagcttctggtgatcaacccctcttcaatgaagacaaaactgttgttgttacggtgaatggagagatctacaatcatgaagaactcaggaaacaattgcctaatcacaccttccgtacaggaagtgattgtgatgttattgctcacctgt

SEQ ID NO: 85842 - DNA, 241 bp, Glycine max
  Clone ID: 700953086H1
tttgatgcaatggtggacccatctcgaaagagttgattcccaaactcagtgtggtgaagaataatttatcctctaaattgggggtagcgctaccagatattgatgcccggcaattcattgctaccatcatatttcttaagggggttggagggattttgtttgtgtttggaagcacatttggatctttcctactgcttttgcatctggcgattactactccacttctgtacatttctataac

SEQ ID NO: 85843 - DNA, 126 bp, Glycine max
  Clone ID: 700953087H1
aaaaatcatattttgttattgctgaagttattgttttagttgcttttgatttgtagaacaaggtccggcaaccatatacttttagttttggcctaaattatacaggaggacacgcaaatagttttt

SEQ ID NO: 85844 - DNA, 240 bp, Glycine max
  Clone ID: 700953088H1
gtgcatctcacaggatgtctggactgagcttggacgtccctgtggcattcatcaaaagcaggttgatcaaatggttattcattctgcttcagattttcggccacggacaactctctgtggtgattacttttataattattttactcgtggtctggacatcttatttgatggacagactcacaaaatcaagaagtttgtgttacacaccaacttccctggtcatgctgatttaattctcac

SEQ ID NO: 85845 - DNA, 139 bp, Glycine max
  Clone ID: 700953090H1
gaaagacaatgccgaagtctcaatttcgaaccccatttctggtttctcttccccttttgttattcatcttcaacctcaccccttcgcacgcactctatggagcatcctcacccgtgcttcatctcactccctctaactt

SEQ ID NO: 85846 - DNA, 150 bp, Glycine max
  Clone ID: 700953091H1
agacaacgaaaggagaagatgaaatgggatatgcagatggaggaaatcgaagcgattatggagaaaatttgggacctccacgataagctcagcgacgccattcactccgtctccagatcccactttctcacttccgtcaaaaccctcaaa

SEQ ID NO: 85847 - DNA, 240 bp, Glycine max
  Clone ID: 700953092H1
aaactagctgtggaactggaagcacattcacattcacatgcaaaaggaatagctgctaaatgatgaacgccgcaacagcagctaatagcagtgtttattcacagacacagtgcagactactttcctcggatcttcgaagttcgattcctttcttgaatgaacgcaagtcacggttggtggtaagggctggcggtcgtcctcctcaaaatatgggcaaggacgaggatgagaacagcagca

SEQ ID NO: 85848 - DNA, 235 bp, Glycine max
  Clone ID: 700953093H1
caagaagcttacccgtttcggcggtttccggtggcgcacgaagaggaaatggaccaatctaatgccgctggtcgtcgccctcgtcgtcgttgcggagatcgcgtttctcggaaggctcgacatggccaagaacgccgagatggttgacaccctcgctgtcttcttctaccgccctcgcgcagtggttgaaggcgacgatttggggctgggtacggtgggttgtggcgcggcggta

SEQ ID NO: 85849 - DNA, 98 bp, Glycine max
  Clone ID: 700953095H1
cagcttttccatggaaatcggctcccccgcattccttaccctcgaagactattcttccttcttcttccctgacatggatcccattcccaattccaatg

SEQ ID NO: 85850 - DNA, 244 bp, Glycine max
  Clone ID: 700953096H1
accgcttctggacatcagtggcggcgcgtggcgcgtgcctgccactcgtgctcaactgccagattgcgctgcttgggtgcaacttggtttgccacgtagcagtgctcttgttgcattttctaacaggagggtgtaacgggattggcgcgtgggtcttcaattccgtgctcaacggtgctattttgttgctgtttcttaatttttacgtgaggatgtatttagcaaggaggaggagcgtaagggt

SEQ ID NO: 85851 - DNA, 254 bp, Glycine max
  Clone ID: 700953102H1
aacccaacttatctctctcgccctttcttttctcatcttttagtaaaagggttatctcctagtttcatttttctcttgtttccaccatttttctaaggtgaccttggaactggtttaattcaaagacacttattccatttgacattagaggccgtgttcgaatacttcatcctccagttatgacttgtttcccattctcatttggtaagaaagtgcgctttgtggcaacacatgatccagatattgatgaagta

SEQ ID NO: 85852 - DNA, 252 bp, Glycine max
  Clone ID: 700953103H1
gtgttgcggctgctgttctttcaagtgctggctacaaggtggttgttcttgagaaaggaaactatttttctactcaggattattcatctctagaaggtccttccatgaatcaactatatgaaactggagggatccttgcttctgtggactcaagagtgctagttttggcaggatcaacagtgggtggtggctctgctgttaattggtcagcctgcattaagaccccacacaaggtgctaaatgagtggtctg

SEQ ID NO: 85853 - DNA, 252 bp, Glycine max
  Clone ID: 700953104H1
gtcgaaccagacacacttccacgtcaccaccaccgtggaaggtggcgcgtgaggctgtttccggcgacctataccggcggcgctgagtggtgatcaaggaaatgggtcagaggctaagctgcgtgcaacagcagcacgaggagcatggtgtgctcttcccagcacttgcaagtggagaattggaggttgttgaggccatggtggaggaagaccccactgtgttggaacacaccactggctgtgaccgccttt

SEQ ID NO: 85854 - DNA, 240 bp, Glycine max
  Clone ID: 700953105H1
tataagaccgatcttcctgaaaatgatcaactgaatgttgcctttgactgatgttggacatgctagcatgcaagtatgcattgctggatttaaaaaggggcagctgaaagtgttgtcccaatcatatgataggtccctaggtgggagggactttgacgaggttctgttcaatcattttgctgcaaagtttaaggaggagtacaagattgatgtattccaaaatgccagggcttgtctgag

SEQ ID NO: 85855 - DNA, 241 bp, Glycine max
  Clone ID: 700953106H1
ctcgggaaaatcacagcgacgctcaggaaaaactctaaactgtgaaaaaaccactgcgatcaatggcaacgatcaaggccgtgaaagctcgccagatcttcgacagccgtggaaatccaaccgtcgaagttgacgttattctcagcgatggaagcttccacagagccgccgtgcctagcggtgcttcaacaggtgtttatgaggctttggaattaagggatggaggctcagactacctcgg

SEQ ID NO: 85856 - DNA, 255 bp, Glycine max
  Clone ID: 700953107H1
gtgcagaacacgactccgatttctgagcgccgaaaggccttgtttgaaccgttagaacccataatgaatattaatggccgacgacccttggctgagtctttacttcctccccctgactttgagtctgcaaactatccaaagggctggttgattggcaagaagagaaagcttgttaatgtcgatgttgttgaaagcatgcgaaggattgccatccaagaaatgaacagaaaggacagggaaattgatgggctaaat

SEQ ID NO: 85857 - DNA, 138 bp, Glycine max
  Clone ID: 700953108H1
ggaaaattaggagtgctgagctcgtattattattatttttcctgtaaattgtttccctcatgtttgtgttttattttcatcatagatattgcaaaccacttattcatttttaaaatttaaataaatatcctatatgag

SEQ ID NO: 85858 - DNA, 255 bp, Glycine max
  Clone ID: 700953109H1
gtgccaaaatcatctccgaggcaccaacatcggcagccacatatttctttatttattggtacagtattgtttttttcttcttcttcttcttcatttttcattaacatatatttctttttcgaagaatcaaaggtagaatctacaatattaaaaaaaactgtataagaaattaaaggtagtggtagtggagtgtgtgtgtgtgtgttaattatgtgtatgcatggtggaagctagagtaatagaggcgcaacatgg

SEQ ID NO: 85859 - DNA, 250 bp, Glycine max
  Clone ID: 700953110H1
gttaaagaggaagttgcaaatctttaccttgggtataggtggtgttggtctggtttcagcttatgtttcttattcccctgagattgcagctagctttggtgctggctttcttggttctttggcgtatattcgtatgctgggaagtagcgtggactcgctaaggactgatggtgcaaagggatttgtcaagggagcaattgggcagccaagattactggttcctgttgttttggtcatggtctataaccgc

SEQ ID NO: 85860 - DNA, 117 bp, Glycine max
  Clone ID: 700953111H1
cgcaaacagcttcacttcacactctactcccaaaatggcggctgctacgacgtcgtattcttccgcaatcgccgcatcgtccgataccctagccaaacctgcttccacacaacatac

SEQ ID NO: 85861 - DNA, 255 bp, Glycine max
  Clone ID: 700953114H1
ggagatcatctgtatgaagcatgggaacacatattaacttgcctctcccgaattgagcatttgcaactgttaggtgagggtgccccaagtgatgcaaccttcttcacttcaactaatcttgaaatggaggagaaagcactgaaaacattaggtttctcttcttttaagaaaggaacactccagaatccagccatggtggctgttgttcgtggtagttcatatgacagtacaagtattggggtcaatgcttctgca

SEQ ID NO: 85862 - DNA, 249 bp, Glycine max
  Clone ID: 700953118H1
ctagaagcaataagatgaaaatgaaagtgcttgttttgtttgttgctacagttttggtagcatatgaatgccatggctcagactaccagaagttccctctccaaatgaaaactgggtttggtgggcaatacagcaatgaggtggcatgtgccagttggaggcttggcgtggaagcaaacaacgtagtcaagtggcaaactgttcctgcagcttgcggagagtacatagctgactacgttctaggagacc

SEQ ID NO: 85863 - DNA, 251 bp, Glycine max
  Clone ID: 700953120H1
ttgaaaactcctcctcatcctcacccccaggaggtatggggaagatagaaaaaaacaaaaacaccttattgacatcaccttttctatcatccttcaagtcatcatcttcttcctcttcttctttgatgatggctaccctcctggtcattctcttggccttgttttctccttcactaggccttcccttagcatctttccaaccaaaagacaatttcctcattgattgtggtgctgaaaacacagtgactctc

SEQ ID NO: 85864 - DNA, 246 bp, Glycine max
  Clone ID: 700953121H1
ggaagttgaagttgggttgctgcaacaatggaacctgctactaataacaatccttctccttctgctcatgcttcattacatgaaaccaaatatattgagagggtgaaacatgccctgatcgactttggagtcccagaagagctaaggttgtctgatcgtagcatctacaaggttccttgctatctccgaaaggtgaaggaagatgcctacactcctcagtgcatctcaataggtccaattcacttc

SEQ ID NO: 85865 - DNA, 253 bp, Glycine max
  Clone ID: 700953122H1
atcttcatattcatcaaactcatcaaaatgaatctgtaccactcctccaccaccaccaccaccaccaccatcttcaccgtcatattcctcctccttgcaatattattcactctcacaccccacaaggccaacggtgccacgtgtcaccctgaggaagaagcgggcctgttgggcttcaaatccggtatccgatccgacccgtccggcctgctcagtaactggatatcgggtacggactgctgcacatggaccg

SEQ ID NO: 85866 - DNA, 251 bp, Glycine max
  Clone ID: 700953123H1
agacgtggaagctgtgacattcggtgtgcgatctcggttcgaagttgtaagcgttcaacgataaggagccgtcgtcggaactcggaagtgggtttgcgtcgttgtgaggtttaacgagacgatgagggcgctgtttctgttcttcgttctcttctctttcagctatgccaccgaacaaatctttcctgctcatatcggtagcattttcggtggtggcggtggtggccgctctcgcgaacccaaatacaaga

SEQ ID NO: 85867 - DNA, 167 bp, Glycine max
  Clone ID: 700953124H1
ctcattgacagggaagaaatataatgcatttaattcaatatggtttgatggtttcgttattttttcgaagactaggaaatcactgcatcatttaatagatattcagtcacgccgagagtttcccaaagtttcaaaatgggaagccaaggttaaataaaattttggct

SEQ ID NO: 85868 - DNA, 245 bp, Glycine max
  Clone ID: 700953125H1
ctgtagttcagaagagcaaaagggaacaggaagatgagattagacagaagatggaagaattgcggaacgaacgtcagaggagaattgctgaaagaactgcatcctctggtgttggtcgtgccgcgacaaagaaagaccaaattgaaggtaaaacagcaaggatttctgccaagagtgacaagaataagggaatcagttctgtcaaggtcaggggaatttagcaagccacacagtaaagtgtgttt

SEQ ID NO: 85869 - DNA, 250 bp, Glycine max
  Clone ID: 700953126H1
gtactctcgcagtctagctagcctgcactacctaagtacttttgtgcccttaagctttgtctttgtaagttggttgtcatcgtgaagcacaccagcagtgtcgtcgtgaagcacgccagcagtttcatcattgtcatcaaccattctccatcattgtcgtgggtcattttccatcattgtcgtcgaccattctccatcactgtcgtgggtcagcttccaggtcatgttcctttctccctttctttcttat

SEQ ID NO: 85870 - DNA, 252 bp, Glycine max
  Clone ID: 700953127H1
ccaagctctgcaactttgcttctcaacatggagtatcgtctcctacccatttttactttactcaatattgcactggtggcaacccatgctgctttaccccctgaagtttactggaagtcggtgcttcctactacgccaatgccaaaagccatcactgatatcctttactctgattgggtggaagagaaaagcagctcagtgcatgttggaggtggaggcgtgaacgtgcatacaggaaaaggaggtggcagt

SEQ ID NO: 85871 - DNA, 254 bp, Glycine max
  Clone ID: 700953128H1
cagaatagttgaagtgaatggcataaaaatgcatgttgcagagaaaggagagggtccagtggtgttgttcctccacggcttccctgagctctggtactcatggcgccaccagattctctctctcagctccctcggctaccgcgccgtcgctcccgatctccgtggctacggtgacaccgaggcaccaccttcaatcagcagctacaactgcttccacatagtgggtgatctcgttgcgcttattgactctctgg

SEQ ID NO: 85872 - DNA, 252 bp, Glycine max
  Clone ID: 700953129H1
gtgagtgaccctgcaaaacttccgaagtggaactatgatgggtctagcacagatcaagctccaggggatgacagtgaagtcattctatacccacaagctattttcaaggacccctttaggagaggaaacaatattcttgtcatttgtgatgtgtacaccccagctggtgagccacttccaaccaacaagaggtatggtgctgccaaaattttcagtcaccctgatgttgctgctgaggaaccatggtatggt

SEQ ID NO: 85873 - DNA, 255 bp, Glycine max
  Clone ID: 700953132H1
caatctctctctctccaatggccaaagacctcgaaacggagattcaaagtgggttgcctcacaaggactaccacgacccaccccccgccccattctacgaccccgccgagctccgaaagtggtccttcttccgagccctcatcgccgagttcgtcgccaccctcctcttcctctacgtcaccatcctcaccgtcatcggctacaaccaccagacagccaccgccgccgagccctgcagcggcgtcggcgtcctcg

SEQ ID NO: 85874 - DNA, 251 bp, Glycine max
  Clone ID: 700953133H1
gttcattcgatgcaggtgggtttcgccggcgccggagacacggcggagaaaaacccgttcaccccaaaagccttcgcgattcggtattgggacaaagagatccgcagcgggttaccgaagccaccgtttcttgtatcaaaggcgtcgccgctgagcgcggcggaggcggcggcgttcttaaagctcgtctccgggaactcgctctccacgcggctgccggaattctgcgccgccgcgaactcctctgcttc

SEQ ID NO: 85875 - DNA, 252 bp, Glycine max
  Clone ID: 700953135H1
gagaaattcaaacaacacaacaaaacctcgagaagtaaaccaatttcaaaatccacaccattctcattccccttctccttctgtactttccgttacgaacttgcctaaaagcaactaaatgcttcaacttcactaacgctatagtatcgtgtcaacaatgccaatgcatcaccatcttcttcttcttccccttctcttctctcttgtttctccgatgacctccctcaactccgacggcctctccctgttagc

SEQ ID NO: 85876 - DNA, 249 bp, Glycine max
  Clone ID: 700953137H1
gaccattccaaattaatctgattctctattgtgcgttgccctgcttcagcttcatagggcttgttggcggtgtcataactcgtaagaaaacaaagctcatcgaatcgaagtccttcattttcattctcttccttgtcactgatcgtcatgtacagagttgcagcatcatcattcagaaggcatctcaagggccatggaggtaacttgggatccactaggttttcaacttcagccgcggtagctgcaagg

SEQ ID NO: 85877 - DNA, 251 bp, Glycine max
  Clone ID: 700953138H1
gttttctgattaactctttcttctcataactctgccgccgcaacagccccaaatccaatggcttcagagaagaaactttcgaacccaatgagggagataaaggtgcagaagctcgtcctcaatatctccgttggcgagagtggagatcgtcttaccagagccgctaaggtgttggaacagcttagtggccaagcccctgtgttttccaaagcaaggtacacggttcgttcctttgggattagaagaaatga

SEQ ID NO: 85878 - DNA, 249 bp, Glycine max
  Clone ID: 700953139H1
caagggtgcttctagcttcctctcagtggcaagctgtccaagaatactactaccatcttatggtgaggaggaccgttggatgtgctcctacagccaatctatttgtaaaaacttctcaggtggcagcaggttcacgagatcttgtgatgtttgatgacaattctgtagtcatggtaacagagtcagatctagaaggttacaacccaagtagtcaatcaggagccatggcaagtgaaatatgggcagatt

SEQ ID NO: 85879 - DNA, 250 bp, Glycine max
  Clone ID: 700953141H1
ccaaaacaaaagaaaacgaaaatccccaatcctgcgttgtgttgcgacttgcgagccatgagaggggtcgtgaaagcgtttgcggggaatctgttgttccatggaagaaagactcagactcagtgcattcgctcctacagtctgatcccaatggtgatagagcactcttcccgaggtgagagggcatacgacatcttctcgcgccttctgaaggagcgcattatctgcatcaacggacccatctccgacg

SEQ ID NO: 85880 - DNA, 247 bp, Glycine max
  Clone ID: 700953142H1
cggagatacctgcatccctttcaaattgtacctatcttaatactcttagacttgaccaaaaccaactcaccggtcacattcctgcaaacttgagtcagctcccgcggcttaagttgtttagtgttgccaataatcttttgacagggccagttccaccctttaaacctggtgtagctggtgcagataattatgcaaataattcaggcctgtgtggtaatcccttgggtacttgccaggtcgggtcttc

SEQ ID NO: 85881 - DNA, 248 bp, Glycine max
  Clone ID: 700953143H1
gcggaaagaagactacttcttgtgctgttggtttggcaaagacagtgttgaggaggaccaaacaacggctactaggttggccaatacaatgtctacctcattaaagggtagacctgtacagggtcgcatatttgaaggcaaagagccgccacagtttgttgctattttccaaccaatggtggttctcaagggagggttcagctctggatacaagaaactaatagcagacaaaggagtatcagatgaga

SEQ ID NO: 85882 - DNA, 251 bp, Glycine max
  Clone ID: 700953144H1
tagttatctactcttttctgcatgtttgttctctcaacgactcctccgcgaaagagtattattcaatattttggttgggttgaatcccggggttgaagcgttgcagacatcacggctattctaagagtgtctcgctccctcattcatgtccgatctgtacgacggaggacgggtagttgcgtaactgccgttaacccttcgccgcacggtgggcgtggtgctttgccttctgaaggtggtagcccttcaga

SEQ ID NO: 85883 - DNA, 249 bp, Glycine max
  Clone ID: 700953145H1
catgtacacgttcatgttcaattttgcgaaagagagaccagagttgggccgggatttgtttctggcatggactggatgggtatgtgtctggactgcactgttgctattcttgtttgccatcttaggggcttgctctataatcaacaggtttacccgtattgcaggagagttgtttggcatgcttattgcaatgctcttcatgcagcaagctatcaaaggactcgtggatgagtttcgcataccagagag

SEQ ID NO: 85884 - DNA, 250 bp, Glycine max
  Clone ID: 700953146H1
gtgcgatttttgtagatcttgagcccactgtgattgatgaggttaggactgggacataccgccaactattccatcctgagcagctcattagtggaaaggaggatgcagcaaacaactttgcccgtggccactataccattggaaaggagattgttgagctttgcttggaccgcatcagaaagcttgctgacaactgcacaggtctccaaggttttctggttttcaatgctgtgggtgggggaatggctct

SEQ ID NO: 85885 - DNA, 253 bp, Glycine max
  Clone ID: 700953147H1
tatcaacagcgcaaggattgataatgtaggtttagacccctgtaatgtccaacaccttctgaatctcattaaccctaatcacatcatggtatgaagaccttcttatctgaatagcacggtgatctttgtggtaagcgaggcagagagagcagagagcaccgttcatacaatctaagcaatacatgttgcactcgctcttgtgcgaatcagcgtgaagcttgcattgaacaaagaagctctctttgagaagagg

SEQ ID NO: 85886 - DNA, 250 bp, Glycine max
  Clone ID: 700953150H1
ctcgagccgcgggactttcactagccgcagcagcctcaggaggagaataaggatgtctcacagaaagttcgagcacccaaggcacgggtcactgggatttctccccaggaagcgtgctgctcgtcacaggggaaaagtgaaggcattccccaaggatgacccatccaaggcacccaagctcactgcattcttgggttacaaggctggtatgactcacattgttagagaggtcgagaagccaggatcaaag

SEQ ID NO: 85887 - DNA, 247 bp, Glycine max
  Clone ID: 700953151H1
aaagaaagaggtgaagtcaaatggtccttagttctgggagtgttgatgcttgagtcttgacggaacgaacggaaaaggggatctcaatggacaacaccaagccccttatcgaactggaactcgacgatgatggcagaatcagaagaaccgggaatgtgtggactgctagcatacacattataacagtggttgtaggggcaggggtgctgtctttggcatgggttatggcacaactaggatggttagc

SEQ ID NO: 85888 - DNA, 244 bp, Glycine max
  Clone ID: 700953154H1
aaagcgcgagatacctcaccgcaaccagtggaactcaccgaattgaactcaagttttttctcttctctcggtttcatcgccatggatgaagaagtgcgcaagatcttcagcaagttcgacaagaacggcgacggcaagatctcgtgcgccgagctgaaggagatgatggtggcgctgggatccaaaacgacgtcggaggaggtgaagcgcatgatggcggacttgatcggaaggcgacggctac

SEQ ID NO: 85889 - DNA, 250 bp, Glycine max
  Clone ID: 700953155H1
gtctccatccataaaaactaataacctaagccaccggcttgatggacactggaacttgctatcctgcgcatgaaaatagtcccatctttttgttttgtttttgtttttgttttttttgtttttatcggcaagtattagttagttttagtcccatctaagtacatctttttctttctttccttttcttttattgaaaagaaattgaaagagaagaaatgatagatgatgtatatataaaagcattgatacc

SEQ ID NO: 85890 - DNA, 251 bp, Glycine max
  Clone ID: 700953156H1
acttaacaacagcacaaagcgggttactgtctgttcaagctaccatctctctctctctttcttagtgcctccttgccagaagttaaaatggcccaagaaactttcctattcacatctgaatcagtgaacgaggggcaccctgacaagctctgtgaccagatctccgatgctgtgctcgatgcatgcttggagcaggaccctgacagcaaggttgcctgtgaaacctgcaccaagaccaacatggtgatggt

SEQ ID NO: 85891 - DNA, 247 bp, Glycine max
  Clone ID: 700953157H1
acctacctctttttcttctctctcaacaacttcaccttcttcctcctcgatcatgtctcacttcaagggcaagtaccatgatgagcttatcgccaatgctgcgtacattggcactcctggaaagggtattcttgctgctgatgagtcaacagggacaattggcaagcgtttggccagcatcagtgtagagaacattgaatccaacaggcgagctcttagggagctgcttttcactgctcctggtgtt

SEQ ID NO: 85892 - DNA, 244 bp, Glycine max
  Clone ID: 700953158H1
ggataactattttgaggaagctttgaagatgaggaaccttcttgaagaatttcattctgatcatgggcttcgtcctccttctatacttggtgttagagaacatgtcttcaccggcagtgtctcatctctagcgtcatttatgtccaatcaagaaactagttttgtgactttagggcagcgagttttagcaaatccattgaaggtccgcatgcactatgggcatcctgatgtttttgatagaata

SEQ ID NO: 85893 - DNA, 249 bp, Glycine max
  Clone ID: 700953159H1
cggatattcggcttgcccggtgaagatgctcctactgagtcataaaatgcctcagttgtacaagccaaagtcttgctctggagtaaacagttgctacctgctattggtgcttggtctaaatatctatgatgagattggaaaagttaatgaaggtagtggtttctttgattattcagtcttgctcctcacatggcatgttgcgtatgtaggatggaacaaatgtactttcaggctttgtgcagcaacatt

SEQ ID NO: 85894 - DNA, 247 bp, Glycine max
  Clone ID: 700953163H1
agttaagaaagactcagaactccaagcttggtggaaggaagctgttgagaagggtcacggtgacttgaaagacaagccatggtggcctaagttgaacactcttcaagatctgattcacatttgctgcattattatatggactgcttcagcactccatgcagctgtgaatttcggacaatacccttatggcggtttcatcctaaatcgtccaactctaaccagaagattgctcccagagccaggaacc

SEQ ID NO: 85895 - DNA, 206 bp, Glycine max
  Clone ID: 700953164H1
ttctaaagaaatataactaatattctttagaataatcaaaaagaatattaaattcaaataaattttagatagaaaaaagacttaaaaaggaggatttgaacatgcgagatctaaaaacatatctttccgtggcaccagtagtaagtactctatggttcggggctttggcgggtctcttaatagagatcaatcgttttttaccagat

SEQ ID NO: 85896 - DNA, 89 bp, Glycine max
  Clone ID: 700953165H1
gattttgagcactatggcatccacacaatgcttcttgcaccaccatgccctcaccactccaaccagagcttcatcacagcgcttagttg

SEQ ID NO: 85897 - DNA, 77 bp, Glycine max
  Clone ID: 700953166H1
caaaagggttgatattctattggtattgccaactgatgctgctctttttgtagacccatgcctgaaggtatatgctg

SEQ ID NO: 85898 - DNA, 234 bp, Glycine max
  Clone ID: 700953169H1
cacatacactcacactctctctttcttccttcctgctgctacaatatggagcctctctcttccaccatacacaacaacaatctctccaagccttcctccctccacacggaggctccgccgccggaggccagtcccctccggaagatcatcgtggtggcctccatcgccgccggggtgcaattcgggtgggccctacagctctctctacttaccccttacgtccaactgctgggg

SEQ ID NO: 85899 - DNA, 88 bp, Glycine max
  Clone ID: 700953170H1
caggaagcttcctttccagaggttggttcgtgaaattgcccaggatttcaagactgatctgcgtttccagagccatgctgtgcttgca

SEQ ID NO: 85900 - DNA, 249 bp, Glycine max
  Clone ID: 700953171H1
aaaccaaacaacttctaacacatacactactctctctctctctcttattgtatggccgccaattccagtagccgagggatcaccgccttagggaagcgagtcgccaaccggatctggacttccaacgcacctcctctcacttcaaggaggggagcatacagtagcggctcagtgtacgacaagaaccctgatgatgagatccagtctgggcaggtcccagacgatgtgatccaggcggcaacacaatca

SEQ ID NO: 85901 - DNA, 92 bp, Glycine max
  Clone ID: 700953173H1
atctatcaccagaacaagcagcattagcaaccaagcaagagaatggcgacgacagctgccttgtgcggcactatgatgagcagctccttcct

SEQ ID NO: 85902 - DNA, 246 bp, Glycine max
  Clone ID: 700953174H1
gtgaggaagcccctggacaaccagttcaacacagtcaccgccgacggaacatcccagaagaacatggctacaggaatcgtgatccagggttgcaacatcgtcccagaagccgaacttttccctacaaggttccaagtgaagtcataccttggaaggccatggaagcaattctcaaggacggttgtgatggaatccaccgtgggtgacttccttcaccccgaaggatggtgcccatgggccggtgaa

SEQ ID NO: 85903 - DNA, 247 bp, Glycine max
  Clone ID: 700953175H1
atcaaatcaatggtttaaatttgacgatgaacgagtatcaaaagaagatccaaagagggctttagaagaacagtatggtggtgaagaagagttacctcgtataaatcctggcttcaaccactctccttttaaatttacaaaacactcgaatgcatatatgcttgtctatgtacgtgagagtgacaaggataaaataatttgtaatgtggatgagaaggacattgctgaacaccttagaatgagatta

SEQ ID NO: 85904 - DNA, 249 bp, Glycine max
  Clone ID: 700953176H1
ggaagaaccaccactaccttatccatttccactcctcaccaagccacaccatggcctcaaccaacgccctctcttcagcttccattctacgctctcccaaccgccagtctctgaccagaagagcgaaccacaacggaagagtaaattaccgtcaaccgaatagccgtttctccgtcaaagcctccgccaaagagattgcctttgaccagcattcccgctctgctatgcaggccggcattgacaagctcg

SEQ ID NO: 85905 - DNA, 248 bp, Glycine max
  Clone ID: 700953177H1
ggactggttaactgaaaaaatgcgtaacaataatttcactgtctcatcaatgcatggtgacatgcctcagaaagaaagagatgctattatgggagaatttcgtgctggaacaacccgtgtactaataacaactgatgtttgggcccgtggtcttgatgtacagcaggtttctctagttatcaataatgaccttccaaataatcgtgagctttacattcatcgaattggccgttctggacgttttggaa

SEQ ID NO: 85906 - DNA, 248 bp, Glycine max
  Clone ID: 700953179H1
gagaaagtggcatcgcttaggtacagatacagatacagacacaacctggaaaaaattccgaccccagcccttcactcttctctctgcagcggaggtgtacttttgatctagtacctgctatccctatgtataagcatggcaagtatttttaaacgttgtgacatccattcttgttaggagttgttataaagctattcatccctgctcaatattctacaccccaagacagagaaggacaatagagatca

SEQ ID NO: 85907 - DNA, 245 bp, Glycine max
  Clone ID: 700953183H1
gtagagtgaatcgttctcatcatggatcttgtaatcaaacatcacaggtgtgacaccctgtgcattcccaatgaggtcctttctgatgatcacaatggtgacaccagagggccccacattcttctgggccccagcatagataaccccaaaccttgtcgactccacaggcttggagcagaaatttgaggacatatcagcaaccaaaacaccactcttgggaacagggtagtccttgaactccaccc

SEQ ID NO: 85908 - DNA, 242 bp, Glycine max
  Clone ID: 700953186H1
tttgatgccaatggtggacccatctcgaaagagttgattcccaaactcagtgtggtgaagaataatttatcctctaaattgggggtagcgctaccagatattgatgcccggcaattcattgctaccatcatatttcttaagggggttggagggattttgtttgtgtttggaagcacatttggatctttcctactgcttttgcatctggcgattactactccacttctgtacgatttctataa

SEQ ID NO: 85909 - DNA, 243 bp, Glycine max
  Clone ID: 700953187H1
tgaagatgaagaacaggtggaaattgagaatttgaatgctagggtcagtgatgttgatgataaaggagacaatcagactagactgtctgaaacagctgatcgatctgttcaggaagctttagaatccggtgctactcaacatgcaagtgatgatgaccttgtcgagagttcttcagccattgcacctgggtatgtacccagtgaacttgatgaaagaattgttcttgagctaccgtcatcaat

SEQ ID NO: 85910 - DNA, 247 bp, Glycine max
  Clone ID: 700953188H1
ctttgtttgcttctcaagtctctcgaagcctctttctctctcttctagaagctatctgtgtttggtgttactaagtctccaacaagcaaagtacatggttgatttggaaatccaggtccccaccccattcgacccgtttgccgaggcgagagaatcggatgcccccggagcaaaggagtatgtgcatattcgaattcagcagaggaatgggaagaagagtctgaccacagtgcaagggctgaagaag

SEQ ID NO: 85911 - DNA, 245 bp, Glycine max
  Clone ID: 700953191H1
gtattgacgtcgatgatgaaaatgaaattggtgaaaacattactgcttctcctttgtgtgaaactcttctgttatgcagtgattggtgctcctcaaacttgtcctgctaacaatgaggataaatgcggcgattcagatgaatggaaaggggagtttttccctgacattcccaaaattaaatatgagggtccgtcaagtaagaatgtgctttcatttaaatggtataatgcagaggaggaaattct

SEQ ID NO: 85912 - DNA, 117 bp, Glycine max
  Clone ID: 700953192H1
tctgggagtgctttcgcagttttcactcactgttcagtagtagggtttttctttatccctttttcttctctcttctctctttcaccacttccacacaacatacgagcaagcgaaagg

SEQ ID NO: 85913 - DNA, 244 bp, Glycine max
  Clone ID: 700953193H1
cgccgccgtcgggatgctgcaacggagtgaagagcctcaatgccgccgccaagaccaccgccgaccgccagacggcgtgcaactgcctcaagtcggccgccagccaaatctccggcttcaaagccaacaacgccgcctcgctccccggcaaatgcggagtctccatcccctacaagatcagcacctccaccaactgcgctaccatcaaggtttgaagagaaagtcatggacgcaggaaaccgga

SEQ ID NO: 85914 - DNA, 246 bp, Glycine max
  Clone ID: 700953194H1
aacacagcaatagcttctggtgatctcgttttctcacattgctctcttccccctttctctctcctctttctctctcttccattgcttctccataagcaacgccacgcgaggtcaattgcgcaatcgccatgactgtgatgactcctgctcccattgaccagcagcaggaggacgaggagatgcttgtcccgcacacggatttagctgagaataatcaccaacccatggaagttgtggctcaacctg

SEQ ID NO: 85915 - DNA, 248 bp, Glycine max
  Clone ID: 700953196H1
ggagaacgggttggtcccaattgtggagccagagatcttgcttgatggtgagcatgggattgacaggacattcgaagtagcccaaaaggtgtggtcagaggtattcttctacctggctgagaacaatgtcctgttggaaggtattctcctcaagcctagcatggttactccaggagccgagtccaaggacaaggccactcctctgcaagttgctgattacaccctcaagctccttcacaggagaatcc

SEQ ID NO: 85916 - DNA, 286 bp, Glycine max
  Clone ID: 700953201H1
actagttctagatcgcgagctgccgccctttttcctccctccgttctactttcaaatctagggttctagaaggaaacatcgtgaagattgtttggattccgccagaatatggtgatgcagttgcgtgcatttctgccgatggaattgtgtcattgtgggaggaggtcgcagaagattcccagtctcttcagtggaagatgtgtaaaagctttggaaacagttcaagcaaagtccttgatgttcaatttggagtctctcttgctagtttgaaaatggttgctgcata

SEQ ID NO: 85917 - DNA, 106 bp, Glycine max
  Clone ID: 700953202H1
gcgtatctgctctcgcaatatgtgctattttgcggatttaagctgcgactagacctgtaacttgggggttctagagtttgtttctgtttcttgcatatatatatat

SEQ ID NO: 85918 - DNA, 176 bp, Glycine max
  Clone ID: 700953203H1
ctttcatgtgtattgcaaatttcagaatgctttaggaatatatgtgactgttgtttaacttttttttaccatgtgcaatgtaaaatccctatgaagttatgttgttccacacaagattgatatagcttgactcaatatttttcatgctggtattttgtgtgcgttaaatttccatt

SEQ ID NO: 85919 - DNA, 282 bp, Glycine max
  Clone ID: 700953204H1
attaatgtgcacaaggatctttgttggttcctggaacattggaggcattacaccacccaagaacttggacatggaagactggcttgacacacaaaataattcagcagatatatatgttctggggttccaagaaattgtaccactaaatgcagcaaatgtactaggtccccaaaacagaaaagtttctatgaaatggaattctctaattggggcagcccttaacaatagagacaccaacaaaggttgttgaagacaataaaacagctgaacctcagaagatat

SEQ ID NO: 85920 - DNA, 279 bp, Glycine max
  Clone ID: 700953205H1
gcgagacagaggaacccacggttccagaaaacctcttgtcgctgaactcaagtataacattgatgagcgcacgcgctttcttggccgcgtgaggagtaccgtccgtcagaagcgaatacagcgaacgcataaccgaagcctccttggccagaacaccggtcacttccgcaccaacattaacacagagagccagcaaaatggacgcacagtactccttccctgagcgcgaagtagcagattgcaaaatcttagccaccaaaggcaacgcctctgctcgta

SEQ ID NO: 85921 - DNA, 276 bp, Glycine max
  Clone ID: 700953207H1
atcgaaaccctcgatttccgcatccgcatcgaggctcacgtcatccaaccgtgcctctccgcacggttacttgctgaaccgcgtcgccgaatacgctacagcggcggcggctgctaccgctcctccctctgctccgcctccgggcaagaaggaggttagcggcggacgggaagatcaccgatgagttcaccgggacaggctcgatcgggcaggtctgccaggtcatcggtgccgtcgtcgatgtcagattcgacgagggtttgcctccgatcatga

SEQ ID NO: 85922 - DNA, 278 bp, Glycine max
  Clone ID: 700953208H1
tcgagcattcggttttgaatcttttgagcgaaaatgcagtcgagtcctttgcttctggaggaacccataaggatggcctccatcctcgagccatccaagcctagtttctttccagcgatgacaaagattgttggcacacttggcccaaagtcacgatcggttgacgtgatttcacaatgtcttgaggcaggaatgtctgtggcaaggtttgatttttcatggggtgatcctgaataccaccaagagacgttggaaaatttaagggctgctatcaaaag

SEQ ID NO: 85923 - DNA, 77 bp, Glycine max
  Clone ID: 700953209H1
ggctcgaggttctagatcgcgagcagccgccctttttttttttggttccataataacctggtgctgtgagtagaagt

SEQ ID NO: 85924 - DNA, 216 bp, Glycine max
  Clone ID: 700953211H1
gggaactgaaaagaaatcttaatacaagattacaccttcagaagagtcttgctgaagtgtgtgcatggacaggtcatgatctttgtattctgaacagtattcagagtttgatgttgattgtgtagacttaggagtgaatagtttgatatatgcatggaaggaagagaagggataagttctggggttacagtgataggagcagaagctccatcagcc

SEQ ID NO: 85925 - DNA, 275 bp, Glycine max
  Clone ID: 700953212H1
ggtgattgaagaaatggcagatgcagcgaagggtacctacagagcctcaagatggtcccttaacggaatgactgctcttgtgaccggtggaactcgtggaattgggcatgccatagtggaggacttatgtgggtttggtgccactgtccacacttgttccagaaaccaagctgaattggataagtgtttgacagaatggcgtacaaaggttttttggtttctgggtctgtgtgtgatgtctcatctcaaccccacagagagaagttcattcagga

SEQ ID NO: 85926 - DNA, 281 bp, Glycine max
  Clone ID: 700953213H1
aacaaacctagctgttcattggttattagctcataatggaagtggaaagaatacaaaccttgtctttgaaccagctcaaggagcttccaccccagttcatccgtccagccaatgaaaggccagagaacaccaagccatagaaggtgtcattgtgcctctcatctcactgtctcagtcacatcatcttttggtgaaggaaatagctgaagctgcttctgagtggggattttcgtcataaccgaccatggtatgtcacaaacattgatccaacgtttgcaaga

SEQ ID NO: 85927 - DNA, 280 bp, Glycine max
  Clone ID: 700953214H1
gtaataagatgccaactttggaggagtatggtaccaatttgaccaagctagcggaagagggaaaattggatcctgttgtgggaaggcagccgcaaattgaacgtgtgactcaaattttaggtcgtcggactaaaaataatccttgtcttattggagaacctggtgttgggaagacagcaattgctgaaggtctcgctcagcggattgcaaatggtgatgtacctgaaaccatagagggaaaaaaggtcataaccctcgacatgggtctgcttgttgctgg

SEQ ID NO: 85928 - DNA, 142 bp, Glycine max
  Clone ID: 700953215H1
aaaagattaaaaaaaaaacaaagagactcaaaaaagagttctccgtcaactgaatctccatcatctttcccctttcccccctttcgcatcttcgtgttttttcttctctctcacttttgcttcttcttcatttcttcacgat

SEQ ID NO: 85929 - DNA, 284 bp, Glycine max
  Clone ID: 700953216H1
ggaagaaccaccactaccttatccatttccactcctcaccaagcgcaccatggcctcaaccaacgccctctcttcagcttccattctacgctctcccaaccgccagtctctgaccagaagagcgaaccacaacggaagagtaaattaccgtcaaccgaatagccgtttctccgtcaaagcctccgccaaagagattgcctttgaccagcattcccgctctgctatgcaggccggcattgacaagctcgccgacgccgtcgggctcactcttgggcccaggggga

SEQ ID NO: 85930 - DNA, 283 bp, Glycine max
  Clone ID: 700953217H1
aagaaatgggtagtcttgaagcggaaagaacaacagtaggattggcagcaagagacccttcagggattctctccccatacacctacaatctaagaaacacaggccctgatgatgtttacattaaagttcactactgtggaatttgccattctgatctccaccagattaaaaatgatcttggcatgtccaactatcccatggtcccaggacatgaagtggttggtgaggtactggaggtgggatcaaacgttagcaggttcagagtgggagagttggtgggagt

SEQ ID NO: 85931 - DNA, 280 bp, Glycine max
  Clone ID: 700953218H1
gcaaatcagcagaacatagtggtggcagatggcacagggcagaagaacatgcccacaggaatagtcctccataactgcgagatcatgccggaccctaccctcttggcagaccgcttgagcgtgaagacttacttggccaggccatggaaggcattctcaagggcagtgttcatcgagaatgttatcggggacttgattcagccagatggttatattccatggaacccaattgaaccaaacacacaggattgctacttcgctgagtttggcaacactggac

SEQ ID NO: 85932 - DNA, 275 bp, Glycine max
  Clone ID: 700953219H1
ctttttcttctctctcaacaacttcaccttcttcctcctcgatcatgtctcacttcaagggcaagtaccatgatgagcttatcgccaatgctgcgtacattggcactcctggaaagggtattcttgctgctgatgagtcaacagggacaattggcaagcgtttggccagcatcagtgtagagaacattgaatccaacaggcgagctcttagggagctgtttttcactgctcctggtgttcttcaatatctcggtggtgtcatcctctttgaggaa

SEQ ID NO: 85933 - DNA, 269 bp, Glycine max
  Clone ID: 700953220H1
caactccataacacaaggcagaaagcaagctcatcgtagagttttagaaatggcagcagcctcctccatggctctctcttccccatccttggctggcaaggccgtgaagctgggcccatcagcccccgaagtcgggagggtcagcatgaggaagaccgtcaccaagcaggcctcctccggaagcccatggtacggcccagaccgcgtcaagtacttgggcccattctctggcgagcccccgtcctacctcactggcgagttcccaggtg

SEQ ID NO: 85934 - DNA, 271 bp, Glycine max
  Clone ID: 700953221H1
attgctacttcaattctgattgcaaccacgacactactccaccttccaacatgggcggtatcagccttgaggaaatcaaaaacgaaaacgtcgatctggaaaaaattccagtagaggaagtgtttgagtcgctgaaatgttcaagagcaggtttaacatcagacgaaggagccagccggcttcaagtttttggaccaaacaaattggaagagaaagaggagagcgaattttgcagtttctgggtttcatgtggaacccttatcatgggtca

SEQ ID NO: 85935 - DNA, 275 bp, Glycine max
  Clone ID: 700953223H1
gagaatcaaaagtgtttagttttgattctatttggatgagtgcaaaatatcttttgaagtcccatataagtaatgatgggttataatcataagcaagaaattgaagcttgaagtgtcaatccagatgttattcaacttattttagaccacactataccgacaatagtgcttgcttaacgggtactcagtgagtactagcctaagctatttatgcaccttagtcaaatgtcatttgttcagcttctttcctaatggattcaaacagtggtgaagat

SEQ ID NO: 85936 - DNA, 277 bp, Glycine max
  Clone ID: 700953224H1
atctaaacaaattgacatgaatgagattccatcatatcacaatcttatttatgtcaatttgtttagtttaatttccatatgttattgttttttttaatattaagtcaggtaccagaaaatttgcatcaattcacactcatgagtcacctgaacaagagctagacccggttttattgtttgtatcactgtatgtaatatttaatgttttcggttcatacttttgttgcggttgtattgttgttgtgtatcatctgtgccattagtttatttgatgttg

SEQ ID NO: 85937 - DNA, 224 bp, Glycine max
  Clone ID: 700953225H1
ctctaaggttgtatgcaagatgaagctcacaaaggagcaagttgctcagttccgagaagcagttaagaaggactattatttccagatgtactatgatgacttgccgatctggggatttattgggacggttgacaaggaagggaaaactgaccctagtgagtacaagtattttctttacaagcacattcagttcgatattcattacaacaaagatcgagtcattg

SEQ ID NO: 85938 - DNA, 274 bp, Glycine max
  Clone ID: 700953226H1
tgaagaattgagcaaatctgatgccactaaaaagttggaactgatggatgactttctggaggtggagaaattggctcggttatcaaatgatttcagtggagtttcagttacttcaaacaatatggcaaatgaaactgtgaccaatgatgtatcagaggtcagtactgagaaagatgttccctctaacacccaagataatagtgagccaaatccattgcctagtgaggtttcttctgctgaggaattgtcagcacctgatccccaatctgatgtt

SEQ ID NO: 85939 - DNA, 271 bp, Glycine max
  Clone ID: 700953227H1
cagaatgaaggtcatcatcatcaattcatcatactcactgtcccaaattcctcttgggtcccaacccagtaactatgattccatcggaaaccgttaattttgctcgaaatttcgcagctatggtcagagttcgtggccctttctggtggaacaactctttcagcttctgggatgctcgtacctgataccctttgtgatgctcaagtagctgggtgtctctatggtgataactgtgaggatagggtgttggttgtgacggttgcttcagttg

SEQ ID NO: 85940 - DNA, 279 bp, Glycine max
  Clone ID: 700953229H1
cgcactccaccacaacgatggacaacgaccgcgtctcccgccgcaccgaggtcctcaccaaccacctcctccgccgcatttccccaccctccgcccttctccacccccacccctgccttagctactcccccccggagctctccaacaccatctccttcgacacgcgtgagatgcgaaaactaatggattgccacaatctggaggagcgcgactggatcttctctctcatcctccagagccccctcttcaacccccgccaccgcgccggaagggtgttcg

SEQ ID NO: 85941 - DNA, 280 bp, Glycine max
  Clone ID: 700953230H1
atcaattcgaagcacatttgttttgttgcaagagaaacagtaatgttggactagaaagtggaaaaccctggtttagattggtgttgggcttttgcgcaggaacatagtcaacactcaacataggatagatagtttgttcgttgcgttgccatgtcggcgtcggagattcttcgggaactggattcgctgaaggacgaaaagaccagaattgagcacaaaatctctgcgcttgaagctcaactcagagagattagtctccaaaacgacgccgcacctccca

SEQ ID NO: 85942 - DNA, 282 bp, Glycine max
  Clone ID: 700953231H1
ctcgcactcgcactcgcagccgcatctcctccgtcttctcctgggtccgacccctcaaacgctccaaaaccgccgacaaactctacaaaaaatacgtcctctcctacaaactcaaataatacatccccatgcatccaataaccaatttcattgcctgattcattgatatatacctatagaaattggaaaaaatgtctcagatcttggcaccgttccagttactggaactgaacgtgatttccgcccaggacctggctcctctgggtcgcaacatgcgtacct

SEQ ID NO: 85943 - DNA, 281 bp, Glycine max
  Clone ID: 700953232H1
cgttagtcacgaatataatcttaccatgaatacttggctagtagtatactaggggttcaaattcaaactatttcaattaggaggatctcaactcaactcatgtttttattaggactgtttcatattaatactgttaaagtttgaattaatttttacctgtccaaccgctatatagataaaataggttaccaaaacaaaatgtaagtttaggacacaatccaactgtacctcactcacatcagattgatcacttttttttcttaaaaaaaaactttgattat

SEQ ID NO: 85944 - DNA, 283 bp, Glycine max
  Clone ID: 700953233H1
gcgagatggggttctgggtcatgggtaatggtaatggattgcagaagctaaaatcacttacagttgcatcttgcaaaggagtaacagatattgggcttgaagctgtaggaaagggttgtccaaatctgaaaattgcacacctccacaagtgtgcatttctgtcagacaatgggttgatgtcattcgccaaggctgcttcatcacttgaaagcctacgattggaagagtgccacagaattacccaacttgggttttttggtgtcctttttaactgtggtgcaaa

SEQ ID NO: 85945 - DNA, 277 bp, Glycine max
  Clone ID: 700953234H1
gccaatttggtgcttattcatcagctcagcctaagttgataacagttgactcagaagaggtagaattcaagtatgaggaagaatctggattggtgactattgatttgagagtacctgagaaagagttataccaatggagcatttctattgatttttgaatcagagactttgtctcaagatgaaggggtttagagttatagacttgatgtatccatagttcgcaacaatatgatgagcgtatgtagaccaatggcaggaaatgttagaggttccctgt

SEQ ID NO: 85946 - DNA, 276 bp, Glycine max
  Clone ID: 700953235H1
cttcaaaacactcataacacaaagcacaaagcaaagctcatcctatgagttaaaaaatggcagcagcttcttccatggctctctcatccccatccttggctggcaaggccgtgaagctgggcccatcagccccagaagtgggaagggtgagcatgaggaagaccgtcaccaagcaggtctcctcaggaagcccatggtacggcccagaccgagtcaagtacttgggcccattctctggcgagcccccgtcctacctaaccggtgagttcccaggcg

SEQ ID NO: 85947 - DNA, 158 bp, Glycine max
  Clone ID: 700953236H1
tggagattcacaggtggaagctatgttggacaagactatatgtgccatgtctagcgtgttcattggagcacctggttccactttcactgaagacatcctgcggctgagaaaggactggggatcagcatccatgtgtgatgagtatctttgccaaagtg

SEQ ID NO: 85948 - DNA, 273 bp, Glycine max
  Clone ID: 700953238H1
ggaacataccaaacaaggatgattttgtgctttcttcatctcagaagactatggcttctctttttaacaaagaagataacataatttccagtacccattctccacaaaatgtttttcttcctaatggccaaagtggtgagaacttcagccctgttacaggttcaagtggttatgatccttggttacaaagtgctctcttcccaccattgtcaggtggcccttcagctcaggagggagccactcaaaatgaaactatatatggtagcccaagtg

SEQ ID NO: 85949 - DNA, 272 bp, Glycine max
  Clone ID: 700953239H1
ctagagcgatacaacagctacatcaggagactcaacagcaccaaactcctcaacgcctcctccaaactcctcttccgtgccactatcttagtcgcactcatcctcgtcttcctcttcaccttcaactaccctcccctcgccccagacttcacctcccaccgccacctccactcccactcccacttcctctcctcctcctcctccttcgcctcctgggagaagcaggtccgccactcctccatccctcgccgccccaacggcctcaccgtcat

SEQ ID NO: 85950 - DNA, 271 bp, Glycine max
  Clone ID: 700953240H1
cttttcaattttcaactctctttggtatttaacttccaccccaactctccttagacttgtgcatttcctgttggctcccatagagtgtggccgtcacatcccaggatcattatgagttgtggctgctttggagcctcaactctcaagaggaaaaggaatccttctcgtactcctaatgagattgatggctttccacttgataatgttaagaatttctctgataaagacctgagactggccactgataactataatccaagcaaaaagctag

SEQ ID NO: 85951 - DNA, 273 bp, Glycine max
  Clone ID: 700953241H1
attactactttctctctctttgtaacttgtaagcatggagtcctcaaagatctatgcttacctcttcctttgcatgctcttcctctcctccgccactcccattctcggttgtggctactgtggcaaaccccccaaaaagcacaagcctggtaaaacaccaaagacacccacagtacccgttgttaagccaccagtcacaatccctcccattgttaagccaccagtcacaatccctcccattgttaatccaccagtcacaatccctcccattgt

SEQ ID NO: 85952 - DNA, 272 bp, Glycine max
  Clone ID: 700953242H1
tctcgagccgaatcggctcgagagaagaaacttaatcgatcatcacttcacttcactaatacatcatggcagacgagacccagaacaagtatgagagctctgatgttgaggtccaggatcgtggtgtttttgactttctcggtaagaaaaaggatgaagaagacaagcctcatcctcaggaggaggtcatcgccaccgagtttcacaaagtcactgtctcagaccatggagagaacaagcacagcctcttgagacaagcttcaccgatctga

SEQ ID NO: 85953 - DNA, 271 bp, Glycine max
  Clone ID: 700953243H1
attcaacttaagagatcaatatggccaccaccactacccagcctccctctaatatctgttttttccttctgttgttgcttctagcacactttcatttgggcataagccaacttgagctgaattactactctaaaagctgcccaaaagctgaagagatcatcaaggaacaagtcacacaactatataacaagcatggaaacactgccgtttcgtgggtcagaaatctcttccacgattgcgtggttaagtcatgcgatgcatcattactgtt

SEQ ID NO: 85954 - DNA, 273 bp, Glycine max
  Clone ID: 700953244H1
gaattttctaataatggccaaagacgttgagcaggttacagagcaaggtgaatactccgcgaaggattaccatgacccacctccggcgccgttgatcgacccagatgagctcactaagtggtccttgtacagagccgccatagctgagttcatagcaacactccttttcctttacatcaccgtgttgaccattattggctacaagagacagagtgacaccaaaatccccggtaacaccgagtgcgacggcgttggcattttgggcatcgcttg

SEQ ID NO: 85955 - DNA, 276 bp, Glycine max
  Clone ID: 700953245H1
aaaaaacttcttcttgttctgttgtgtccatatgttatattttattttatgatatacatagaagcttgttcttctgatctaattttatgagatcaagtgttggttctttctccatctagtactattatttttcccctgtaatatatatatatatatattattctaattaaactaattcacaggctacttgatccgtttgttttgaagaagatcatcgcctgtttttggttaactgtttaatccaaatccagtttcattttacgtgatccgttaaat

SEQ ID NO: 85956 - DNA, 278 bp, Glycine max
  Clone ID: 700953246H1
aaagagaatccgaggcgaagagaagagaaaaattgagatggaggggaaggagcaggatgtgtcgctgggagcgaacaagttcccggagagacagccgattgggacggcggcgcagagccaagacgacggcaaggactaccaggagccggcgccggcgccactggttgacccgacggagtttacgtcatggtccttttacagagcagggatagcagagtttgtggccacttttctgtttctatacatcactgtcttaaccgtcatgggagtcgccgggg

SEQ ID NO: 85957 - DNA, 281 bp, Glycine max
  Clone ID: 700953248H1
gtttttgcattttgctgggtctatattgtaagaattatggcatcagaggagacaacaatttggaaggcaatgataaaaactccagcctccatagtgttgataatttacaccttcatatcaatgtggtttgtaggtggtctcactgccttccatttgtatttgataagtaccaatcagactacatatgaaaacttcagataccgatatgatcggcgagccaatccatataataaaggagtgttgaataatttcaaagagatattctgcatcagcattcccct

SEQ ID NO: 85958 - DNA, 277 bp, Glycine max
  Clone ID: 700953249H1
gtaataagggtcaatttacttcatcaaagaatcaggatggaactaatagttggggttcagatcaagagtcagggcaggatgctgttcaatctgaaaccttgtgcacacattgtggaataagttcaaaatccactccaatgatgcgtagggggccatctggtccaaggtcactttgcaatgcttgtgggcttttttgggcaaataggggcactttgagggatctttctaagagaaaccaggaacactctcttgcaccacctgagcaggttgatgaggg

SEQ ID NO: 85959 - DNA, 275 bp, Glycine max
  Clone ID: 700953250H1
attttggttcatttttattttttttgtgaaattagaacagctaaaattttggctatagattactttggctcttagaaattagaataatactatcaaaacatttcttttctgtatacttacgcctggacttttgaactggttcaaagcccacatggtgcatagaaaccaagatgttcaagcagcacaagcttggtatatgggagctgttaatttctttattgttcctctgacagtttggcatcagaaaatttatgatacaagtctggtggacttgg

SEQ ID NO: 85960 - DNA, 271 bp, Glycine max
  Clone ID: 700953251H1
atcattcaaaagtttttgaaatgttgtcaccccttcttctatttctatgcctaactcttcctttgtttttgttgtccttcttcacataccgtaaaaccttcaagaatccaccacttccaccaggtcctagaggccttcccataatagggaatcttcatcaactagatagtccttctcttcatgagcagctatggcatctctcaaagaaatatggtcctttattttcccttcaatttggattaaggccagccatagttgtttcctctccaaa

SEQ ID NO: 85961 - DNA, 273 bp, Glycine max
  Clone ID: 700953252H1
tgcttaatggttaagacttaagaagagtagttagttagtagtaattttgttcttgtctttgtctcattggactcaacagagagaacgatctttgcgtttccgtgtctccaagtcctctgttttacactgctgcgcgatacttcattttctgaatataaatacgcaactcaattacccaacccaactttcttttctttgacaaaaaaaataaaaatcccacttcctttttcttctttttttgttctttgttttttgtttgataagaaactgcga

SEQ ID NO: 85962 - DNA, 186 bp, Glycine max
  Clone ID: 700953254H1
gccttgggccgtttcttgctgctagtgccccagttggtagaagagcctatggaggccacttaagcagaaagtgctttcaaaagcaacttcacttccactcacgttgtgttgctttctcttcattcatatgttctgcaactatatcagtgatgccagaattagaagagaagcaagtgtttgatggag

SEQ ID NO: 85963 - DNA, 268 bp, Glycine max
  Clone ID: 700953255H1
agtttgggtgcttttgcaaccattaaccatcttcacttccaggcttattatttggctctgcccttcccaattgagaaggcccccactaagaaaattgcaagtttaaatggtggggtgaagatatctgaactgttgaagtatccagttagaggtctcgtctttgagggtggcgatacgctggaagatttatcaaatgttgtttcagatgcctgtatatgtcttcagaacaacaacatacctttcaatgttcttatctctgactgtggaa

SEQ ID NO: 85964 - DNA, 265 bp, Glycine max
  Clone ID: 700953256H1
ctccaacgacattacagcgttcaatctcgaaccttcaaacgacggtcacacacaacacaatccatgccattctgaaacgcttcttcttttgcttgaacgaccgtcgtttcgttccgaaatggggactctaacgagttgcagtttcatgcctctgaactcggagtttcgccgcgccttcagggagaggattcagtgccacaagctcacgcgcatgaggggcacctcctgcttcttctcacgcgcgcgagtacccaaatggggcaag

SEQ ID NO: 85965 - DNA, 122 bp, Glycine max
  Clone ID: 700953257H1
gttaaatttacctgcgaatcttgggttcactccaagtatgataaccctgctaagagagtgtttttctccaacaagtcatatttgccatctgaaacaccagaaggagtgaagaggttaagaga

SEQ ID NO: 85966 - DNA, 266 bp, Glycine max
  Clone ID: 700953258H1
tgagtttacatgcttagttctgaacgtggatgtccctttcataatatctccctctttatttccaagaaccttcaactctatctccaccttaaaaggttagggtaaaataatatagttgacaacttgacacaatgggatgattattgaagaagctgaagggagcacccttctggccttctagccctttattctccttcccctgaaccctttttcttatttatttttttcacaacacccatctctcccaaatgcttatcttgatttga

SEQ ID NO: 85967 - DNA, 209 bp, Glycine max
  Clone ID: 700953259H1
aaatggtcaggtgggacaatatgatgtcagcatcaatacccgacgaggatatcttctacacagttggatttttgcattcaagtgggtttgataattggaaggcctatgatgctcaagataaagaaattctacaattctgtaacgactctgggatcaacgttaagcaatatcttccccactaccgcacacaagaagattggacaaaccat

SEQ ID NO: 85968 - DNA, 124 bp, Glycine max
  Clone ID: 700953260H1
cacgctttctctctgcttagggttttgatcgcatcggatcttcactctcttctccgatctcaaaatgcccgccgtttatggagctcgcttgaccaccttcgaagactccgagaaggagagtgac

SEQ ID NO: 85969 - DNA, 203 bp, Glycine max
  Clone ID: 700953261H1
ggaagcagatgctgttgtttcagtattgggtgaaatggatgcatggatactttgtggctttttccttcaaggaggtcgttacactattggaggcatacactatgttgatgattctgatacgcttgttcctgcaggggacactgagtttgccaaagctgcttcctttggctacaaatcttcaaacctgcgtgattgggtagagg

SEQ ID NO: 85970 - DNA, 277 bp, Glycine max
  Clone ID: 700953263H1
gaaagaagcatatgatgaaattcagactccattggttccccaaatgccaactacattggggctgaaagaactgaaggaatctactattgaactggcttcaagtcaaggatatattgatgcccctgttgatgaggttgtctttgatgtgaataaggatgtggatgaccttttgccagttgaagttaaagaacagcgcctcagcaatctactgcaggcattgatggttgcggcttgtgttgctgctatgcccgttttgaagaagataccaacttcagtg

SEQ ID NO: 85971 - DNA, 180 bp, Glycine max
  Clone ID: 700953265H1
ggtagaccagtgaaagatcatcccaaatcatcttggttgagtttatttaattttggacacaagtaatcgtcctgttattgtgattaagatattttagatgaatttgaggaaatattttcttctctaaattaattttgaacatattacaggataaaaaagaaaaaaaaaaaaggggggccg

SEQ ID NO: 85972 - DNA, 270 bp, Glycine max
  Clone ID: 700953267H1
gcaagtgggccaagacctaatccacaaggatcataccattatggtttgataaacacaactcgtacaattagacttcaaaattctggtccagttatcaatggcaaacagagatatgctgtcaatagtgtgtccttcatacctgctgatacaccacttaaactggctgattactacaagatccaaggggtgttctcccttggaagtatccctgactaccccactggtagtggtggctaccttcaaacttctgtcatggaagccgatttccga

SEQ ID NO: 85973 - DNA, 88 bp, Glycine max
  Clone ID: 700953268H1
taagagaatggctgtggcgtcgtcatcatcccttatcacgatgaaggtcaagctcgcattttcgggtctctcggagtaccctgggtgg

SEQ ID NO: 85974 - DNA, 266 bp, Glycine max
  Clone ID: 700953270H1
caacaaccttgtcctcaaggttgaaatttgggaattggctttggatgaaaatatcatttttccaagtcacattctcaactagactatccttccacttgatcaagccttgtcaggctgtagcacccattttgtgacacttctttggcctaaaacggcctctggttcaatgtcagtattagttggaattaccttaacttagcctttcttaattgtaagacgtgaaaaattggatggattgaagactatgatggaagttggaatttgta

SEQ ID NO: 85975 - DNA, 268 bp, Glycine max
  Clone ID: 700953272H1
ggcgatggacctcggaacctatgacgtgccagaaggagtggacattctgggaagatacgatgcagagtttgcaaaaatcctcgcaaaagatgctttgaaattcgttgctgaactgcaacgtgagttccggaacgatatcaagcatgcattagagcgcagaagagaggcaaagaagaagtacaatgaagggtctcttccggggtttgatcctgccaccagtgacatcagagagcaggagtgggtgtgtgcacctgttccaccagctgct

SEQ ID NO: 85976 - DNA, 266 bp, Glycine max
  Clone ID: 700953274H1
attcccgtccccttaatccaaaatggcaaaaggttttgccgcattatgctcaagatattggtagggaagagagcgaagatgaaagtgatgataatgatggatatgaaaacaatgcacccaaagtttgtgggctatttcctcggttctgccttttgaatccagttccaggattaagaatggagggtaggattcgaagttctacatttcatggagtgcagagtaaatcaattacttctcacagaagaactgcaaaagagcatggtaga

SEQ ID NO: 85977 - DNA, 257 bp, Glycine max
  Clone ID: 700953275H1
ccactatgaaactctgaactgagaaatgaataacattacaaaacgctaaaccctaatcttctgcaattcgtgtgcgtggaaaggttcgagaatggtttcgctggaggaatctcgctctaattcgagccgtttccccttggcgaggagttaccagtaccactcctcggtttcgtccaaaacgcagcgtcacatcggaaggtccatgcgcacgatacgctccagtttcttccaggacgacaacagcagcagctgctgct

SEQ ID NO: 85978 - DNA, 266 bp, Glycine max
  Clone ID: 700953276H1
cttgcgccttagccctctctcactccgcctccatcgatctctttacgccctctgactccgtctgtacgtgtcactccgcctctgtcagcgccgccaccgtcgtagtgtctcctgcaccgtcgctctctcaccattgaagtcattgttgtcgtcgtgggggttgtgagggcatattcgtgttgctccatctggtgcgcgtctcattcaatttaatttgtttttccctttttattctcctatagcttgaaggggttgttttggtgcat

SEQ ID NO: 85979 - DNA, 271 bp, Glycine max
  Clone ID: 700953278H1
ccttgttctgtaccaaccctttcttccacatgttgagtttcagcatcgtcctctcttgagtccccatatcaaatacccaccgaattcaaccccccatataacaaatctcctcccatcccatttttcagcaccaaagtttgaaacttttctcaattgggttgaggagagtttgactcaaatttttatttttctaacgaagcagtagctattagaagtgcaaaaattaaatgtccaacatcttcttgttgatgtttgagattcatgtatccga

SEQ ID NO: 85980 - DNA, 274 bp, Glycine max
  Clone ID: 700953279H1
cctgatttacattcttgccattcgtgttgaactgaaaaccaaattgaaagaaagaagcctacggtctgaaaaatccacttgtcctgatgagttatgtaagtccagtaatggcagcagcaactgcccttctttctcttgcattagatccatgggatgaattccgagaaaacaagtactttgataattcattgcatattactcgaagttgcttgctgatgcttcttggtggcacattgccttttttatggtactaacagaatatgttctggtctca

SEQ ID NO: 85981 - DNA, 278 bp, Glycine max
  Clone ID: 700953280H1
gaaaagaaaagaaaagcaataaagaaagggaaaaaagaagaagagagaagacaaagacaaaaggttctcaaaactccatgattattcagattctctcaaaaacagtaccaagcaatagtcccctacttgatcaacccacaggagtggacctctctcagagtctctacaagaccctgtttaggcttgggttggaacaacatcaaaaaaagaaaggagagactttctttctcttttgtagatcgagatcgtagaaattaagagaggcatgaatagaggtg

SEQ ID NO: 85982 - DNA, 270 bp, Glycine max
  Clone ID: 700953281H1
gaatgcagcaagcgtgtttggttgggggggttagtattcttgagacttgcggaatacagttccatggtggtggagtgtttcttttcgagttatgcaggatgtgggagtagtgatgtttccattactgagctctgcaaactttaggcttgatttgctatagattatcatgtttattgatagatatcatcaaatggatgattaagttggatttaccatgcctataatgatatgataagtagactaattaaagctgcatgcaattatttattg

SEQ ID NO: 85983 - DNA, 265 bp, Glycine max
  Clone ID: 700953283H1
ggcgatatggttgcttggggcatgggaatgaagaatgtgaatcagtacctaaggtggtggaagcattgagcaatgtcaaagctgttcatgttgcaacaggagattacacgacctttgtagtgtctgatgatggtgatgtgtattcatttggctgtggacaatctgctagtcttgggcataatgctgctggaaatgatgagcagggcaacaggcatgcaaaagtgttagatccagagcttgtcacttcactgaaacagatcaatga

SEQ ID NO: 85984 - DNA, 267 bp, Glycine max
  Clone ID: 700953284H1
tctcgagccgattcggctcgagattggccagatttttttctaagaaacgaaaggcggtgacacttgtatgtggaagaaagtagcaccgtctcttctccactttagctaaactcccgaaacgcagctgcgccactcgtttctctggcctcgccgtgattgctaccactccgttcgcttcatccatgtgctgttgtatgggttgaacgaggaagataagaaattgcttcgggaatggagtgggacagcaattccgatctgagcggggac

SEQ ID NO: 85985 - DNA, 269 bp, Glycine max
  Clone ID: 700953285H1
tctcgagccgaatcggctcgagactttccccaacttgcaatgacataacctgatggtcgtgaacgaatctgtcatgaagcgtacaacactagtggctaacacttcaaacatgccagtggctgctcgtgaagcttcaatttatacaggaatcacattagctgagtatttcagagatatgggttataatgtcagtatgatggcagattctacatctagatgggcagaagcattgcgtgaaatctctggacgactggcagaaatgcctgcag

SEQ ID NO: 85986 - DNA, 266 bp, Glycine max
  Clone ID: 700953286H1
cttacctcttggcatggccattcaaatgtcttcttttgtctttgtgtctcttacaattttattttgcttctcttccttggagaagagttttgcctttcaaacaacaaaggaggacacagaaagcaacaatcttcatcaatatactcatcttgttcacctcagctcactccttccttcatcttcctgcagctcttctgccaaaggtccgaaaagaaaagcatcattagaagtggtacacaaacatgggccatgctcccaactgaata

SEQ ID NO: 85987 - DNA, 265 bp, Glycine max
  Clone ID: 700953287H1
cacatccatctttgccttctgcatgttggttctctgtaaacagatactgcaaaagaagaataatattgaatatttggttgggttgaatccctgggttgatgcgttgcagacatcacggctattctaagagtgtctctctctctcattcatgtcccaactgtacgacggaggacaggttgcgtaactgccaccaacccttcgccgcacggtgggcgtggtgctttgccttctgaaggtggtagcccttcagacttgctcttcttag

SEQ ID NO: 85988 - DNA, 267 bp, Glycine max
  Clone ID: 700953288H1
gtccttcgtcagttaactgtgggctaatcacagttcaggaagcccaaaactattaaagtatgtatatctgctctctcttttttgtttgactgagcatagtattcaactcaaagatgatcactgtttctttctttctctatatctcaaaaaggaaaccgacaacacaaaggatttgcagaaagtgcagctacttagttccattttcatcctctctccattgactttcagtcaaaacaaaacaaaacctctttaggtgtgagattccac

SEQ ID NO: 85989 - DNA, 265 bp, Glycine max
  Clone ID: 700953291H1
gttttcttacttttcctatctcatttcttctctattctctcttcatgtcaaaatatttgtcaacagagtaccatgcatgttttcaccatctttgaatataagaaaattatatatttttgtgacttttgtttcctaaaagcacaaaaataataacaaagtaattaaaaaaacttataacatgtgaatgagataagggaaaattattagaatttttcttttttacctataaaaacacttaagaagaaacaataaaaaaagtaaataa

SEQ ID NO: 85990 - DNA, 264 bp, Glycine max
  Clone ID: 700953292H1
ctactttctctctctttgtaacttgtaagcatggagtcctcaaagatctatgcttacctcttcctttgcatgctcttcctctcctccgccactcccattctcggttgtggctactgtggcaaaccccccaaaaagcacaagcctggtaaaacaccaaagacacccacagtacccgttgttaagccaccagtcacaatccctcccattgttaagccaccagtcacaatccctcccattgttaatccaccagtcacaatccctccc

SEQ ID NO: 85991 - DNA, 270 bp, Glycine max
  Clone ID: 700953293H1
aaggcagaaagcaagctcatcctagagttttaaaaatggcagcagcctcctccatggctctctcttccccatccttggctggcaaggccgtgaagctgggcccatcagcccccgaagtcgggagggtcagcatgaggaagaccgtcaccaagcaggcctcctccggaagcccatggtacggcccagaccgcgtcaagtacttgggcccattctctggcgagcccccgtcctacctcactggcgagttcccaggtgactacggctgggaca

SEQ ID NO: 85992 - DNA, 265 bp, Glycine max
  Clone ID: 700953294H1
tactgctacagggaatgagccgggatgttcagcctccacaaaagcatgcatatacggcatccagtacggtgacagttcgttctccgttggctacttcagccgcgagcggctctccgtgaccgccaccgacatcgtcgacaacttcctcttcggttgcggccaaaacaaccagggcctctttggtggctccgccggcctcatcggcctcggccgccaccccatctccttcggtcaacaaaccgccgccgtatatcgtaaaatcttc

SEQ ID NO: 85993 - DNA, 272 bp, Glycine max
  Clone ID: 700953295H1
tttctgtgataggatggatttgccttgttctcaacataagcgtttttgctgctcctctttgcatcatgaaacgtgtcataaagacgaagagtgtggaattcatgcctttcagtttgtccttctttttgaccataaatgctgtcatgtggttcttctatggccttctcctcaaggactactacatcgcactcccaaatactcttgggtttctattcggcataatccagatggtgctgtatttgatttatagaaacgccaagccacaaggatta

SEQ ID NO: 85994 - DNA, 273 bp, Glycine max
  Clone ID: 700953296H1
agcggtatgaaattcaccacaagctccgctatactgatgaggctcttgtagctgctgcacagctgtcctaccagtatatcagtgatcgatttttgccagacaaagctatcgatttgattgatgaagctggttcacgagtccggcttcaacatgcacagttacctgaagaagcaagagaacttgacaaggaggtgaggcagattattaaggagaaagaagaagctgttcgcaaccaagactttgaaaaggctggagagctacgtgatagagaga

SEQ ID NO: 85995 - DNA, 261 bp, Glycine max
  Clone ID: 700953301H1
aatggaaattgattgctttgtgttgatctcgcacaattagaacccagaaactgattgcagcatgtttttgcttttatgatgatcatgcgttttatgatctttccttgcgtgtgtgtgttcctttctaattttgaactttcgatcatggatttatttaaaattctttaatttgccgacatatcgtgaacgattgtggaatcagtgatttttttccatcaatccatggaattcgtctgaatccatgttagcattcggctttca

SEQ ID NO: 85996 - DNA, 81 bp, Glycine max
  Clone ID: 700953305H1
caaattagttcattctctttgcgcagttccctacctctcctttcaagatgcagatcttcgtcaagaccctcaacggaaaga

SEQ ID NO: 85997 - DNA, 265 bp, Glycine max
  Clone ID: 700953306H1
caaacttccacgaccatctattctttatatccgcttccaatttgttaattttcattctgatacgattcagggtatcgccaaatttctcgattttccgcatattttggatttggaggggtttgaagaaataaccgaactttggaaggaaaaacacaaccccatatgatgcaacgcttggttgatcatgttcttgctgttactaaagagtcattgaaggcaattactatgagtccttaaataatattgtgaggctaatcaacggagt

SEQ ID NO: 85998 - DNA, 81 bp, Glycine max
  Clone ID: 700953307H1
gggaagtcaagggttccgacaaggcatggatctttattctaagagacatgatcgccaagctgtgacttgtgacgatttttc

SEQ ID NO: 85999 - DNA, 266 bp, Glycine max
  Clone ID: 700953309H1
attgaatggcaaatacgacgatggcaaatatgaacacgaacagcaactccaaagaagaaagcaaaaaaatggatgaaagagaggcgatacccttgctcaccccatacaagatgggaaattttaatctatctcacaggattgtgttggcaccgttatcacgatcgaggtcttacaacttcatccctcagccgcatgctgctctatattattctcaaagaacaactaaggtggctttttgattggggaagcctccggtgtgtctgata

SEQ ID NO: 86000 - DNA, 264 bp, Glycine max
  Clone ID: 700953313H1
gagattattgccacttttttctgttttgtgtatagtttgaattcagatctgcaacatgcatgcttcttcggttgttccaaagtgctataatttgtgattttcttggcttggaatcggttgagtaagcataatcgactaagcatgtaagcataatcgattaagctcaaacaaaccgattacgcatgtaagcataatcgattaagctcaaacataaaccgattactatctgtataattactaattagtattttgagtgaatactaa

SEQ ID NO: 86001 - DNA, 267 bp, Glycine max
  Clone ID: 700953314H1
ctaaaattctctttctgcttagtctccacgctcttgcttgcttttgtgtgagagaacaatggcaatggtgaagtctcccaagaagcaagtgaacctcttctattcccttgactgtgaagaccttgcccagaacgttgctcttcaatcaccccacatcgttctccagaacatcaaatggaggtcatttgctgatggatttccaaatatatatataaataatgcagaaaacttcgaggtcaacatgttgctttcttggcatctttcagc

SEQ ID NO: 86002 - DNA, 267 bp, Glycine max
  unsure (1)..(267): unsure at all n locations
  Clone ID: 700953315H1
gggagacgtgagaggcgttcgtatcaagaactgctcattgactggcacaaccaatggccttagaatcaaggcatggccagagaggtatccaggtgcagcgtcagatgtaagcttcagtgacattatcatgaaagatgtcaaaaatcctatcatcattgaccaagagtatgaatgttatccagactgcaaaaagaagccgtcacttgtanagctccaaaatattcattctcaaatataaggggaactacaatttcaccacttgcagtg

SEQ ID NO: 86003 - DNA, 267 bp, Glycine max
  Clone ID: 700953316H1
cagatctggagcaggagaatagcgttggcagcgtttgcgtttgctctgctgttccaatcggcctcagcagacgacgtcgttgtgctctctgaagataacttcgagaaggaagttggtcaggacagaggagctctcgttgagttctatgctccttggtgtggacactgcaaaaagcttgctccagaatatgaaaagcttggtagcagcttcaagaaagccaaatctgtttaattggcaaggttgattgtgatgagcataagagtttgt

SEQ ID NO: 86004 - DNA, 269 bp, Glycine max
  Clone ID: 700953317H1
ccattctctctgtgtatttccctacctctcccttcaagatgcagatcttcgtcaagaccctcaccggcaagaccatcacccttgaggtggaaagctctgacaccatcgacaacgtcaaggccaagatccaggacaaggaaggaatccccccggaccagcaacgtctcattttcgccggaaagcaacttgaggacggccgtacccttgctgactacaacattcagaagggagtactcttcacctcgtcctccgtctccgtggtggcatgc

SEQ ID NO: 86005 - DNA, 266 bp, Glycine max
  Clone ID: 700953318H1
gtgcatacatagctatctatttatctatagcaagtgcgtcaagagacacgtggtaccctagctagagtgccattctgtggtttctttctttctttctttctgcatcacatcacaatttgcattgcctcgtgtcctttttcttctttgctctccaaaaatctcacacacacaggtatctagcaaatgggttctcaccaacaagaaccatggctattggagaatgggaaccaagggttttgaccaaggagaccaggcatggccgttct

SEQ ID NO: 86006 - DNA, 260 bp, Glycine max
  Clone ID: 700953320H1
gtggtttcagtgagtgatcggtgttcacttgatccttcataagtcgtcatcatcatcatcatcatcaccgttgattgaagaagatgccgatcagaaacatcgccatcggaaggcctgaagaggctactcaccccgacacgttgaaggcggggttggctgagttcatctccaccttgatcttcgtgttcgccggttcaggttccggcatcgcctacaacaagtcaccgacaacggcgccgccactcccgccggcctcatct

SEQ ID NO: 86007 - DNA, 262 bp, Glycine max
  Clone ID: 700953321H1
ctttctctaatccaaatatctctccgttaatgctctcaccacaaacttcaatagactagccaaaagctaacaccaactataggccaaatcaccaataaatattatttcccgttcttttggcgtgttggccacccactgaacacatttgcactcacacatagaagcagagagaggccattggttggtttcagagatgggaagcatgcacatagaaaccccagaacttttgctgatggtagcaaaaacttcgatgatgatggac

SEQ ID NO: 86008 - DNA, 263 bp, Glycine max
  Clone ID: 700953322H1
gtggtttcagtgagtgatcggtgttcacttgatccttcataagtcgtcatcatcatcatcatcatcaccgttgattgaagaagatgccgatcagaaacatcgccatcggaaggcctgaagaggctactcaccccgacacgttgaaggcggggttggctgagttcatctccaccttgatcttcgtgttcgccggttcaggttccggcatcgcctacaacaagctaccgacaacggcgccgccactcccgccggcctcatctccg

SEQ ID NO: 86009 - DNA, 262 bp, Glycine max
  Clone ID: 700953323H1
caataagcgaattctcagatttgtatgcatggagaaaacaacaacgcacattgtagtaattcccagtgcaggattcagccacttcgttcccattatccacttctcaaaacaactcgttgagcttcacccagaaattcacgtagcatgcatcattcccatactagggtctctcccaagtgccgcaaaacccattctccaaacccttccacaaaacataaacacgctttccttccaccggtgaaccctaatgagctaccacaag

SEQ ID NO: 86010 - DNA, 263 bp, Glycine max
  Clone ID: 700953325H1
atttcatttcacctctctttcctaacccccaacgccacgccactgtcactttctccaccaatgtgcaccaatagcaataataagaatcatctctcacttctccattaaaattaaaatccaatctaatctgggtttccctttctcccatcagaggacaaagcttccaactttgcgggattcgtatttgttgtttcagtgctgtgatggggaaggtcgcggtggggctgcggttgtctgcgccgccgccgtctgcgctacggcgg

SEQ ID NO: 86011 - DNA, 262 bp, Glycine max
  Clone ID: 700953326H1
aattccctcaaatgtttcacaaccttagcaaaaaagacatctatgataatcaatctagaactgcttttaagactatgtggcaaggcatggatggactaagaggtccaggtctttctggcagcggcaattacttaagtagaagtgctttactatttggaagtccaaaccaaaaagacgactatctgaaggatgcacaaaagtactttggcaagtctaccgcatcattgaatcactgaaggccatccgtggacagaaaagtagc

SEQ ID NO: 86012 - DNA, 261 bp, Glycine max
  Clone ID: 700953329H1
ttggacgtggaggatttggagcagtgtaccaaacagttcttagagatggacattcagttgccataaagaagctcacagtatcaagccttgtcaagtctcaagaagattttgaaagagaagtgaagaaattaggaaaaatcagacaccaaaacctcgttgaacttgagggttattattggactccatcactgcagctcctcatatatgagtatctctctggtggagtctctataagcatctccatgaaggatctggtggaaa

SEQ ID NO: 86013 - DNA, 265 bp, Glycine max
  Clone ID: 700953331H1
atttctcaagaaaatccattggctctacttgattgtggatgaagggcatcgattgaagaatcatgagtgtgctctagcaagaaccctggactctggctatcacattcaacgaagactgctgttgactggtaccccaattcagaacagtttgcaggaattatggtccctgctcaattttctccttccaaacattttcaattcagttcagaatttcgaggactggttaatgctccctttgcagaccgagtggatgtctctctaactg

SEQ ID NO: 86014 - DNA, 73 bp, Glycine max
  Clone ID: 700953332H1
gttgtttctctcccaccctatgaacaacaacccattaatgtaatgaaagtttcgtataccaggtcgcggcctt

SEQ ID NO: 86015 - DNA, 175 bp, Glycine max
  Clone ID: 700953333H1
tgatgtttagggtttttatgaaccccgtcgctcagtaattgtacccggataggcggctaagaataataatctgagacgaccaacctcagcctcttaccatgagtaagctacaaagtgatgcactgagagaggcaatttcccaggtggtgagtaattcaaaggggaaaaatcgtaa

SEQ ID NO: 86016 - DNA, 262 bp, Glycine max
  Clone ID: 700953334H1
cttactggaagccttgttgtgagtaagagaaaaggcttcctgcaacgagcacaccaacttgatacctctgattctttctttgcttagaattccacagaatatggagactgttcttttcaatcactccccacctttggaattcaagggtttgagcaaggaggaggaagactcattgctagggcaagtggaaatatggaggtacatgacatgcttcacggactcctggccttgaaagctgtcatagagcttcgtatagcggaca

SEQ ID NO: 86017 - DNA, 259 bp, Glycine max
  Clone ID: 700953337H1
attaggtcaccaccacgatctataatcttatccttgggaaaatatactgtgatcatcatgggaacatggatatacgtggtaatcgtacatattcatgcagactcaagttcaaagagcagacgatccttgatcgaaatcctcgccaggtaagagttattggttattagtggcaagtcacaattctttgcaacctgttctttatattattctatttatcttcctactccttaaatttcgcctgtctaaattccaaagtaac

SEQ ID NO: 86018 - DNA, 259 bp, Glycine max
  Clone ID: 700953338H1
ctcgagccgttttgcatcgtcgtcacacatggagatctccggcaccgttctccgtcaggtcagctacgtctccggctatgggacccacacgcggtcccgcggcctggctcctcgttttggggtgaggatggggatgggttctggtttctgtgacgaggggcatttgcggtattaccaggacaccaaaaaggttctcaccccaaagaagaagttgaagctctcaagggtttctccaaattagggcttgcatcggatcccg

SEQ ID NO: 86019 - DNA, 261 bp, Glycine max
  Clone ID: 700953339H1
gagagtcggtctaagaggtaggaacaaaatgaggagtgtagagcgaagatttggcagataaatgagtgaatattgtcattcatggttaatctgatttgcatggtttgaattttgaaaaaatattatttttttttgttcttttcttatcctgaggttcagttatttcgtgtaaatctcagacatgcaagcaatttgaattgaaaaaataatccgggatctttagattctcttctctctcatcatcttcggtctttgctgaat

SEQ ID NO: 86020 - DNA, 260 bp, Glycine max
  Clone ID: 700953340H1
ctctcttccaaacacacatcctcacccatggcagcaccatcttcagagacaaagtcaccatcatcctcgaacacgcagcttccgctgaaaccaatcccaggcagctacggaatgccgttttttggagcaataagcgacagacacaactacttctaccaccaaggacgcgacaagttcttcgcgacgaggattgaaaaacacaactccaccgtgatccgaacaacatgcctccggggcccttcatctcctcggaccctcgt

SEQ ID NO: 86021 - DNA, 261 bp, Glycine max
  Clone ID: 700953342H1
aagacttcgagatccctacaatttctaaagatgttgacatgaaggagatatttagcatactaaagcaagcattaatctccaaatctcctctaagtgaagtattcttcaaaaaagaatgatctaagtcatgctcttgcccatactcttgcccttgctcacgaaataccaacccaattcattggaaagattctataaaaatcaaggtaatggtgaacaaatcaataataagattgtgttggccgaagcagatggagattttgt

SEQ ID NO: 86022 - DNA, 263 bp, Glycine max
  Clone ID: 700953347H1
aagaagcccaatcttttcatctacggtgatggccccacaaataccatcatcactggccgcaagaactttcacgagggtaccaagacaatgagaaccgccaccttctctactgttgccgaggatttcatggcgaagtcaattgcatttgagaacaccgctggtgcagaaggacaccaagcagtggcacttcgcgtgcaaggtgatcgttcagtgttctttgatgtgctatgcgcggttaccaagacacattgtatgcccacgcc

SEQ ID NO: 86023 - DNA, 262 bp, Glycine max
  Clone ID: 700953348H1
gaataaacggaacttgaacaattatggttacttatcgatggacatgtatgttcatctattgtaggaactccttatatttctagtatcaatgtaatgtagtgcttaatgtagcttgactgttaaatggggatttgagtaggctttatttggcattcagatagttatgaaatctgaattgacttcagtttcttgctaaccttggtgagaagcagactttgtagcggatctgaatggtgcactatgaatcgaccatgtactttaa

SEQ ID NO: 86024 - DNA, 262 bp, Glycine max
  Clone ID: 700953349H1
ggaggaaataatatcatttccgttctcaaaatcataacagtacttcgcgtgccctagctcactccgtcgctcctcacccttccggcagtgcttggtcgtggccgtcacggttcaaacttcaaaaggctatggatgacttgtttgattcttcgctgaacttggaggacacccattacaaggaaggctatgacgaaggctacagccatggccttgtcactggcaggaagaagctaggcaggttggcctcaaggttggctttgag

SEQ ID NO: 86025 - DNA, 256 bp, Glycine max
  Clone ID: 700953351H1
ttgggattggatcaagctcctctggaggattgagaagtggccggaaatttatattgaaagctgtacctactttcccttcattgtctccttgcattaattccaaaagcaatggcgatgaggattcttgtaacagtccgagcaagtcacctctcaaagctaatgagtgccctcaacgtgagagttaacaagcagaagattgtgtaatctgttgccgacatttgtctgtaaaggttgccgggggtgacttattatgtga

SEQ ID NO: 86026 - DNA, 258 bp, Glycine max
  Clone ID: 700953352H1
gaattagctgatatagacgtttttgttagtacagtagatcctatgaaagaacctccacttataactgcaaatacagtactatccatccttgctgtagattatccagtggagaaagtttcatgttatgtctcagatgatggtgcagctatgctgacatttgaagccatttcagagacttcagagtttgcaagaaagtgggttccgttctgtaagaagttaacattgaacctcgggctcctgagtggtattttgctcaaa

SEQ ID NO: 86027 - DNA, 258 bp, Glycine max
  Clone ID: 700953354H1
cattggtgtggcctagctgttttctcaatgagaaagccttcatctctgctaagcgcacttttgcgctttggggttcccttgttgcttgttatcaccttctgttatgctacttctactgctgcagcaacaactcaagtttcagggaatgaagagctgccaaagacaaacctaaatgggcatgatgaagaagcaaaattcggattttttcatcataaaccatattcaagaaacatattccaattccagtatataaacctg

SEQ ID NO: 86028 - DNA, 54 bp, Glycine max
  Clone ID: 700953355H1
caagctacaagcacccaaaggggaggaataataataagcctaacttctaaggcc

SEQ ID NO: 86029 - DNA, 258 bp, Glycine max
  Clone ID: 700953356H1
caaaaacattctctcccattcctcaatcctcccccttagcccttcattttctttttctttcttttgttggtttgtttattcctttattctctgcttctgcattttgtacatgcggtgttctatttctcttggtttgataacaggatttggcacaagcgttgtggtctccccatttcaggagaatcatcactcattgccataatatagagcttgttaaaacaaaagacagaaaagtgaagtgttttgagatctggcatg

SEQ ID NO: 86030 - DNA, 256 bp, Glycine max
  Clone ID: 700953357H1
atcggataagctatttgagcctgaattattcaagcagattgattctgttatcaaggcatgctcaaatccctcaataatacgctcactgttcagtgctactttacctgattttgttgaagatcaagctcgagaacttatgcatgatgctgttcgtgtaattgttggcagaaagaatatggcttctgaaacaataaagcaaaaattggtttttactggaatgaagaaggaaaacttctagcaattcgtcaaagctttg

SEQ ID NO: 86031 - DNA, 257 bp, Glycine max
  Clone ID: 700953358H1
ctgggttgcagggaaaaagaaaaataaaatgggttccgataataccaacttggagttcttgaaggagatcggtttgggctcctccaacattggttcttacattaatggccaatggaaagccactggttcttctgtcacttctgttaatccttctaacaatcagagcatagctcaagtgactgaagcgactttgcaagattatgaggagggattgcaagttgcagtgaagcagccaagacatggatgactattccggc

SEQ ID NO: 86032 - DNA, 215 bp, Glycine max
  Clone ID: 700953359H1
cacactctttctctctcttcaattcagcttcttcagcttcagcgaaatcctgttctaaccgtagatcgtgccttttcttttgtgcctgagaagccacttctctacttgcggttcttcttcttcttcttcttcttcaattttattcgattcgcttgctggaaaattctttgagtgagggagaggatgtctggtggcacacagaagagtctgagaaa

SEQ ID NO: 86033 - DNA, 253 bp, Glycine max
  Clone ID: 700953360H1
ttcacatgttaatcaagcactggacttgaaaaaagaaccacttccagagaaacatgatttagacgaagggctaacaactgtaaaagaaaataaggatgagaaccacgcaaaagtatttactcttctccaggaggtaccctgttcctctgtatcttcagcaaatgagagttcaataacaatgtctgtgccactgggaaatccatgtgccttcaaggagatacaccttccgtgaaagaggtaatagcacgagatg

SEQ ID NO: 86034 - DNA, 259 bp, Glycine max
  Clone ID: 700953362H1
cgccctttctttcgacggtgccgttttgggcttggccttggcctacgccgccgtccgcaccctcttcaaattcaccgccacctctgccgccctccgcaagctccaccgcgccccttctgtctccgtctccgacctccgatccctcctcgccgagataacctccgacgccgacggaaactccgacggtggcaacatcgtaattgtccgcggcactgtcgagccaagtccgccgtcgaaggcggcacctggaaaaccctga

SEQ ID NO: 86035 - DNA, 260 bp, Glycine max
  Clone ID: 700953363H1
gttgaaaacagagtctctgtttctctgaagctgaccaaagaccattctcctgtctaatttgctggcattattgccgtcttgttgtttttgcacccaaattcccttcccttgcataacaagtttcaatatttccaattttaagattccaaacacacccccccttcctcttttttttatcccttttctgctttgttctctgtagagtaacagatctttgcatctctggttataattccgagccgggtttcttgttagcactg

SEQ ID NO: 86036 - DNA, 252 bp, Glycine max
  Clone ID: 700953364H1
tcgcttcttcgccatgggagaagacttcaacaataacgatcctctcatccgcaaccaaaacgccgccgttcaggctcgcgccaaggaccagaaccgcgccaacgcccttcagctcaagctgattggacagagtcaccctactggtctcacagcgaatttgttgaggctctttgagcctaggcctgccttggactataagcctcctccggagaaaagaaatgccatcgctaataggcacaaaaaagagcaaga

SEQ ID NO: 86037 - DNA, 258 bp, Glycine max
  Clone ID: 700953365H1
tgccgttaaggatccatctgctccccatggagttcggcttttgattgaggactatccttatgcttctgatgggctagagatatgggatgccatcaagtcctgggtgcaagaatatgtgtcattctactacaagtcagatgcagcaattcaacaagaccccgaactccaagcttggtggaaagaacttgtccaagtgggtcatggtgatttgaaagataagcatggtggcaaaagatgcaaacttgtgaagagttgatt

SEQ ID NO: 86038 - DNA, 259 bp, Glycine max
  unsure (1)..(259): unsure at all n locations
  Clone ID: 700953366H1
gttcctctcgaggaaattatgaaggataagaattttgatcttgtaacaaaagaaatatttggaccctttcaggttatcacggactacaaaaacagtcaactatcagttgtattggatgctgtggaaagaatgcataaccatttaacggctgctgtagtttcaaatgattctgaggtgctccggttgcccnggctcttagaccagcataagtagtaccattactgaattgccaacaacttcctgtaaaaacaaaggatca

SEQ ID NO: 86039 - DNA, 258 bp, Glycine max
  Clone ID: 700953367H1
aaaaaagatatattatagcaactgaactattgtgaagcataaaagaacaaaaatcttatttagttgtaaagcaataaaaatatacagataaatgaagaggtgaaagaaagagagaaaaaaaatcaatgatatagaattctaatatgtaaaggtctatgggttatctcataaaaggtagtgtaataaagcatcaatctaaatcaattcatatctatttaatatgaattaatttataacgtaaacaaattaagagctctg

SEQ ID NO: 86040 - DNA, 257 bp, Glycine max
  Clone ID: 700953368H1
ccttgttcttctttctctattgtctatagtcatctccattgttctcttcattacccacacacacaaaagaaacaacactccaagaggaccaccaggtcctccacctcttcctctcatcggcaaccttcaccaactccacaactcatccccacatctctgcctatggcaactcgccaaactccacggtcctctcatgtcgtttcgcctcggcgccgtgaaaccgtcgtggtttcatcggccagaatcgccgaacaaat

SEQ ID NO: 86041 - DNA, 243 bp, Glycine max
  Clone ID: 700953369H1
tagagttggatgctttactttcgttgtcaggtttatgtgaatcttgtagtgtgaatagatttcacactgtttctgttctctctagtttcctatctttttttaacactccttggaatttataatgatggcatgcaaagtattctccctgctatcttagcagaaagaataatattaactgagtttgaataatttgaggactaaatcatacacccaaataaatcaggggtcaaaattaccagctag

SEQ ID NO: 86042 - DNA, 256 bp, Glycine max
  Clone ID: 700953370H1
gaggaagaagacgaagaagaatccaaaagcaatcccatctgtgtgtttgcacatcagaagggagggctatcaaactcaaaggattgctctgaatcggtttagtcttcttcgtttttcttcaaattcctcgtgacagatctaatctaatcaggcttatgggggtgtttcagacattgcatgcatatgggagcagtggttgtgttggatgctataaaagcctacactgagtgctactgtggatgtgccatcgaaaggg

SEQ ID NO: 86043 - DNA, 256 bp, Glycine max
  Clone ID: 700953371H1
aaaaaccttggcccgcatgatcggttgatccatgtttatcatttcttgaaagacacaactcaaaatcaggtgttttcctctaaatctgtctaatatattaatatttttttctttctaaaattactaccttaaaattttttctaacatttgtactttcttttcttttgtgttggtgttttttgaaaacagcagcaagttcagaactttggacatcctttttattggttatccatgagggtgagacattaactgaagt

SEQ ID NO: 86044 - DNA, 256 bp, Glycine max
  Clone ID: 700953372H1
ctcacttcacaaggagcagaattttgattgtggacttgagcaaaataatactcgcctttcaaaattgcatgaatctcatgagagtcatatgcttgcagagccagatgacacacttgaaccttgtgcttcgggatcatttacatgttatcttgagggagagaaagtacattcagatggtgaacttaacagaacattatccgagtgtttcccatcaaagagtccaatctttctgagagaatagattctgcatggactg

SEQ ID NO: 86045 - DNA, 255 bp, Glycine max
  Clone ID: 700953373H1
cttctctcgatcgggtgtgtacgtaattaacataacatgtttcgataaccacacaccccttgtgtcatggcatgatgatgatgatgatgagaccagtaacgtggccctgataaagttttcaaagtctaagcatcttcttccttgttgtcatgcatgcctgatggaatcgacgacgcaaaagaacaaaagcaaaaagtcatcgttgttgatgcgtctaaacccgttatgggcttcgacgactctattatgcccaat

SEQ ID NO: 86046 - DNA, 254 bp, Glycine max
  Clone ID: 700953374H1
tgctttcagataactgatagttgtgtgcaattatttgaattcaagaatgtctcaacccgactcgttggtggctgagattgaggtgaaaacctctgctgatcacttttacgacaccttgaagggtaagaaacagcatcgtattcatgatgttgcccctcatcatatccataaggtggaagttcatgaaggtgagtgggataaatctggcaatatcaggtgcttacattcgctgatggggacactgttgagacctt

SEQ ID NO: 86047 - DNA, 255 bp, Glycine max
  Clone ID: 700953376H1
aacacaaacatccctcttgatttgaaggttgttttgtgcttatagataaaagttctgccaaatcaagaggggttttcagatcatagtgtgtgtgtgtgtgtgttaaacaatggctaagttctttgctgctatgatcttggcactcattgccatttccatgcttcaaacagtggttatggctgctaatgagcaaggaggccacttgtatgacaacagagcaaatatggaagtgggagtgtcaagagataccaatgc

SEQ ID NO: 86048 - DNA, 256 bp, Glycine max
  Clone ID: 700953377H1
tataataccaagttatctgacttttttgagattctggcaacatctgaggatagatatggacagactttcgtttccacagcacgtggtaggaaatatcccgtgactgtcaacctatggcaaccagagaaaaatgcttttgaatgggctacatctttgaaagcccctcacacagaggatgcaattcgggttactcagtccacagcaaactttttcatagtgaagctaggaaatccacaaacacacctgatgctcaaaa

SEQ ID NO: 86049 - DNA, 255 bp, Glycine max
  Clone ID: 700953378H1
ggctcgagcggctcgagcactttctctctctctctctctcacccagatcttgtagcaatggcgagcgctcccactccacgcgaagagttcgtgtacatggcgaagctggcggagcaggccgagcgctacgaggagatggtggagttcatggagaaggtctccgcctccgccgagagcgaggagctgaccgtggaggagcgtaacctcctctccgtcgctacaagaacgtgatcggcgctcgccgcgcctcctggc

SEQ ID NO: 86050 - DNA, 256 bp, Glycine max
  Clone ID: 700953379H1
cgacgacgcggggaatctccggtctccaccgacatctcttgtattctcttcacaatcccgtgatcccatttcgttccgttcacttcaatctcaatggccgataataagcaacccaatcacgaggaggcaagtcctcttctccaccagtcccaacccaaatccgaaccaccaacgccacctgagactcccgagtttcttctcggatggaccgctgatggctcacgctgggccacggcagcgtcgtgggccagcccat

SEQ ID NO: 86051 - DNA, 247 bp, Glycine max
  Clone ID: 700953380H1
caagagtactagaggagactgggtcgtgtttttcagaattttgaatactaatttgttttggtgtggggatgtgagaagaaggcacagggtgagggagaaagagggtggtagtttcctgggagaggactttttgcttcattttctgagaactgcttctaaaacttttacattatatttggcatcaagagagactgcatgaatattttaagcgagaggctttgagggcgttggtagtaagaatggatat

SEQ ID NO: 86052 - DNA, 252 bp, Glycine max
  Clone ID: 700953383H1
ttagattgcgtgaataacgcgacgctgttaaccttgttctcgggaaaataccatgtacaagatatcgattacaagagatacaaaatcaaggttagtgacgcgggtgcagtggaggactcaaattgtttcatccctcgcaatttcttatgggatggtaatttcaggcccacgggcctggtcggcccagatgattttggatcacagccgtttgtttggaccttgatttcaccagaattgggtacttcaactgcg

SEQ ID NO: 86053 - DNA, 70 bp, Glycine max
  Clone ID: 700953384H1
cgttgctcgtttcaatttctctcatgggcaccaagactatcaccaggaaaccctcaacaatctcaagact

SEQ ID NO: 86054 - DNA, 210 bp, Glycine max
  Clone ID: 700953385H1
tcttcaatggaatttggcaaaaagtagccatcgccccaacgatcccatttcccttgacttctctacgtgaagatccttgtgtcacatagagctagttaaaatgtcagagggaaatgcagggaaaggaaagagaatcgccatcattggcgtctcaaccttattgttggtggctatggttgtggcggtcacaattggggtcaatctcaatga

SEQ ID NO: 86055 - DNA, 255 bp, Glycine max
  Clone ID: 700953386H1
aagaaagtggtatatattgatatatgtgtgtatttcctttgggcttgaaactcaaaactataataatgggttcttcttctcctccggacactagcaagagcataaagctagagcgatacaacagctacatcaggagactcaacagcaccaaactcctcaacgcctcctccaaactcctcttccgtgccactatcttagtcgcactcatcctcgtctcctcttcaccttcaactaccctcccctcgccccagactt

SEQ ID NO: 86056 - DNA, 255 bp, Glycine max
  Clone ID: 700953388H1
aaacaactacttggtctatgactattgccatgatcctgggagagaccatacacttactccagaatgctaaggttttaagctatatttggattaaaattgggaaagtatgtatttttataaattctaatacacaattgcaaaatacagaatgaaaaaggaataattaatttgtagctttgaaaacaaagttacttttgaactttcccaattgaaattatacatccacttaattggtttggttcaagttggtatatt

SEQ ID NO: 86057 - DNA, 253 bp, Glycine max
  Clone ID: 700953390H1
attttagttgtctcagtcatcattcatctcttgcatgcacccagcaataagtaagtggtatgggcataattggtgtctccaaggactgaaatttatttgcaagttggcttgctcttggaatctcaaattctgggtttcaagtttatttgctacagcaaaatgactagtacagaggaaaagcctgtgactgtgagtgaggaacatgatgcaagtcttgcagaagaacagtttctcttccagttcaaaaggttga

SEQ ID NO: 86058 - DNA, 253 bp, Glycine max
  Clone ID: 700953391H1
gtggcattaccaggatccatctggaaaagttcagggaccattttccatcgtgcaactacgcaaatggagtaacacaggatactttcctgctgatttgaggatttggagaaccactgagaagcaagatgattctatactcttaacagatgccttgacagggaatttttctaaggaaccatcaatggtggataaagctcaatcggtgcatgatttcattacccatcatcatactctaggaagtctccacaacaag

SEQ ID NO: 86059 - DNA, 253 bp, Glycine max
  Clone ID: 700953395H1
gtcttaagtagtaatgttcagctctggagggttggcaaatggatgctatggtatatggtatggcaaggataatgacattgtacctctgtagtatgcgttgagccaaccatgtgacatcattgttcttgactctacaaccaaaaaactggctgggatactatgatagattttgaagggatcatttcagctgttgagtgtttgttattgtgatttatttcttatttctgccaaatgcagctagttcggttccagt

SEQ ID NO: 86060 - DNA, 256 bp, Glycine max
  unsure (1)..(256): unsure at all n locations
  Clone ID: 700953396H1
ttttcccttttattttgctctcttctctgcacaacaattccttctcattccagatattccaaccatcgaccgatctcaattctcaaccttaacctctcagaatgtcttacgcttatctcttcaaatacatcatcatcggtgacaccggagttgggaagtcttgtcttctacttcaattcacagacaagcgctttcagcccgtccatgacttgaccacggtgttgaatttggtgccangatgatcacaattgataac

SEQ ID NO: 86061 - DNA, 267 bp, Glycine max
  Clone ID: 700952763H1
caattctcccactccttccctaagctgccgaatcagcacttcgtcatcgattccaatacggcgccgttttccttcgccatcaagcgcaacgcataacaatcgtcagcgccaccatttcccttcggttcccaagaatcaatggcgactcgtgcgttgctcggagcaatcaagaaacgcaccgtttcgttccccgcattccgcggccattccatttatcgacacggtagcacgcttgtggtggcggaacacgaaggtggttttatcaaa

SEQ ID NO: 86062 - DNA, 267 bp, Glycine max
  Clone ID: 700952764H1
gtggaagttcatgaaggtgagtgggataaatctggcaatatcaaggtgcttacattcgctgatggggacactgttgagaccttaaaggagagagttgattttgatgatgaaaacaagaagataacctacaccatattggagggtgtcatgttgaagtactataagagctacaaggttatcgttcatgttttaccaaaaggtgatgagcacagccttgtgaagtggactttcttgtatgagaaggtggatcacactgcccctgagcca

SEQ ID NO: 86063 - DNA, 269 bp, Glycine max
  Clone ID: 700952765H1
cttttcttcccaacactcttgggtgaggaattggacacccagacgaattgaatggccatggaaaatcaaaattttctagagtattgggttttgccactacttatgatgcttttgttgggtcattggatctctgttcaagctgccccttcaccctctctcatcactcaactccctggctttaacgccaatttcccatccaagcactattccgggtatataagtattgatggaaatgctgaaagtgggaagaacctgttctactactttgt

SEQ ID NO: 86064 - DNA, 265 bp, Glycine max
  Clone ID: 700952766H1
ggaagagagcagaaactggagaagagaagccataaaaaaatcacagatctaaccaaactccgatttcgattccgattccgggaatagactaccaacaagagcaaacctaaggagaaggaatgtgcagctagatgactaccattgtccattttgttcgtgtcatgaggaggaagcgtcccacatattttttggttgccaaagaataatgcctttatggtgggagagccttgcatggacagaggttgtaactgtgttccttgcatca

SEQ ID NO: 86065 - DNA, 270 bp, Glycine max
  Clone ID: 700952767H1
acaaagaccctgtttaggcttgggttggaacaacatcaaaaaagagaaagcaaactttcttttctcttttgtagatcgagatcgtagaaattaagaaaggcatgaatagaggtgttttgcaaagctcaccggtgcaacaaatgatggccagaaaccctaacaactggtggaacatcaacaccatgcgccctcctcctccttctcaagcttctgcacctttcttctccactccttccaactttctaactccttataaccccacttctcttc

SEQ ID NO: 86066 - DNA, 265 bp, Glycine max
  Clone ID: 700952768H1
catatccccccctagctacagagcagccaaaggggaggaataataataagcctatattctaaggccggaaaaataaaaaaggaataacaaaaatgtctggaaaggtaattatctcggctgtttctctcatcctggtggttggagtggccataggtgtggtggtggccgtcaacaagaagggcgaggatcccacacttcaatctcaacaaaaatcagtaggggttatctgccaaaacactgatgaccagaagctctgccacgaaac

SEQ ID NO: 86067 - DNA, 268 bp, Glycine max
  Clone ID: 700952770H1
tacagatcaggatatggagaagggcaggaagggcagtggatagagccactgctgagcatctctttgaggtcatcaactcaagggaggatgtgttgaggaggttgatccgccgttgcgcttatctcaagtatgttgaggcaaggcttggtgataggacactctttgcagatgagattctcaaagatggtttttgcttgaacatgattgaaacaccactttgtcctttgaaggttgtcacaaacttgcaagaagctgtttgggatgctga

SEQ ID NO: 86068 - DNA, 260 bp, Glycine max
  Clone ID: 700952771H1
ctttatgttattttatttattttctatttttatgcttgcagttgcgtcaatgtgccttgtttagtaaaccttgtgaatttttaattaggttggaactcttgctatacttgactcgctgttgaagtcaagactttatttaattatgcataatatttaatttaaccctctgatactgctttctttctagtacggacaaaagcttgtccaatgtgtttgtcttataataattgcctgtttgtgtctttctagttttttcatga

SEQ ID NO: 86069 - DNA, 267 bp, Glycine max
  Clone ID: 700952772H1
gggaaagatactgagtctgatgtgctgactaattttgataaggatcttggaattcggtttagctcggccttgaactattttgtccgggttggctacattcttcatttgatacttgttttccctgttattcatttctcgctgcgccaaacagtggatgcgctagtgtttgagggatcacatcctctatcagaaagtaggaagagatctctggggttgactgtggttctgttggtcctcatatatattggctctaccatgattccaagc

SEQ ID NO: 86070 - DNA, 267 bp, Glycine max
  Clone ID: 700952773H1
gtggagttgaattctttaccctcaagtaatcagaataataagggtctggttgcaaagtttacaagtaatgctcctgcagctaattctcttgtagcagagtccaagcccagagagatggcgtcacggaacatgttcaaacagccagatactaatggagttgttaatggagagttggctaatgtaaaagtcacaaatacaagtttgaatagacaggtgactggttcttcacctgaaagtacatcaaaccaatcaagcagagcagctcct

SEQ ID NO: 86071 - DNA, 267 bp, Glycine max
  Clone ID: 700952774H1
gtcagcccggtctctgttgcacacttctcgcagtacaagctaactatgttactactcaagcgacttgaaaacctaggcttccaaatatgtgcgcctgaaagtttggaaggaaatgaacagtcttgtgagaaaaaaataatgatgggccatgagtgtgtttccattgatgccagcaatgactttgtaacagtaactgcatcttctatcattaaagggaagcgtgtagaacagaacattcactgtaacatccttattggtacagatggt

SEQ ID NO: 86072 - DNA, 263 bp, Glycine max
  Clone ID: 700952775H1
ctttcttttccctctctcaattccaagtgggttttatcttctactttttttctttctccaaaagtgttaaaattttaactttgttttgccttaatttgattgttttatgcagagtagacagtagatttagacacccttttggaaaaggaagtgttttttgagggaaaggagggaattttttgtgtgggagggtggaacccggaattcggtttggttggggtagagaggatgaagattcagtgtaacgtgtgtgaggctgcgga

SEQ ID NO: 86073 - DNA, 264 bp, Glycine max
  Clone ID: 700952778H1
ttattctagtaatacatttctgggttttgtttgccttgtgtgtatctttctattgacgagaataatggaatgttcccaattctctgttttttttgcttttgtccatttttgtgggaatttgtttagcttctactgaggaacaggaaagggacaggattgccaagctgccaggacaaccagaaaatgtgctatttgcacactactcaggctatgtgactgtgaatgaagaagctgggagagcattgttctattggctggttgaga

SEQ ID NO: 86074 - DNA, 264 bp, Glycine max
  Clone ID: 700952779H1
agaaaacacaaagtgtgctcactttattgttttctcaatgtcttcgtttacgggtgcacgttccaaagcaaatgctaactctgaaatgaccaaagctaacgacactaacctttgccccatcaacacaagtaccattacatcaacctcgccagatacaagtgccaagaatgataagaaaaagaagtctatccttccaaagattttcggatcaaagcgaaatgggagaggttcagacgaagagacactcaaatcatcaagtgcaga

SEQ ID NO: 86075 - DNA, 264 bp, Glycine max
  Clone ID: 700952780H1
cactgctggaattgatcactttagtgaattgagtcaggttaggcctcaaaatggcataacatccatatctcctaaaaatgtgagctctcctctgtccttgtcacctcttggtcgtaaattctcggaaagaataaaaactgctggaggatgtagggatgttgttgaagagataaagaattgcaatataacttcaaggagtatagaacaatcacttgacaattccaattcacgtctcatgttaaattataaggatgatgattccag

SEQ ID NO: 86076 - DNA, 267 bp, Glycine max
  Clone ID: 700952782H1
gaagaatcatcaccccaaaacccaaattaaaaaaaaaacccaaataatacaactgaagttattttaattttcttagtaaaaaaaaaaaagagaagaaaaatgacttcgattcatttgataaacactctcgctgctccgcttcgttctttttctcctccgtcgctttttccgcaatgccattctcctctccgttcttccgctgccccgaaacggggtcgtttcgctaactcctctgggttccgccttgcttcaagccaaaccgtgaat

SEQ ID NO: 86077 - DNA, 265 bp, Glycine max
  Clone ID: 700952784H1
gcaaactggtagtctctactctgattgggatcttctccctccaaagacaatcaaagatcccgaggctaaaaaaccagaagattgggatgacaaagaatttattcctgatcccgaggataagaaaccagaggggtatgatgacatcccaaaagagctcccagatcctgaagccaagaagcctgaagattgggatgatgaggaagatggtgagtggacaccccctaccattgccaaccctgattacaagggcccatggaaggcaaag

SEQ ID NO: 86078 - DNA, 268 bp, Glycine max
  Clone ID: 700952785H1
gtttccattcccaattcccaatcgtgttgggtggccatggattctctactggcgaactatgcctcttcagatgaagaagaagatcaacagccatccccaccaaaaacgacgacgttttcctcccttcctcaacccaaactttctctgtttcaatcccttcctcaacccaaatcttctctgtttcaatcccttcctccacccaaacaaccttccaccgaaagctcttccctccctaaccctaaccctaaccctgaccctaaaccccaaa

SEQ ID NO: 86079 - DNA, 267 bp, Glycine max
  Clone ID: 700952786H1
ctctctaacacggagtgatggctgtgcagctgtgggaaaccctgaaggaagccatcgtagcctacactggcttctctccttccaccttcttcacggtgctggcgcttctttttgccgtttactacgtcgtcacgggtctctttggctcctccgacgatcaccatcaccgccaccgccacgtcgaggaggaggaggagatgccgcctctgcgccccccggttcagctcggcgagatcacagcggaggagctcaaggcctacgacggca

SEQ ID NO: 86080 - DNA, 268 bp, Glycine max; identical to SEQ ID NO: 85294
  Clone ID: 700952788H1

SEQ ID NO: 86081 - DNA, 264 bp, Glycine max
  Clone ID: 700952790H1
gccagtgcctccgcctggaacctacgtcatcaagatccctaaggaccaagtctatcgcgtccctccgccggagaacgctcgccgctacgaccaatacactcgccgtaaacaccgccggagccgatgctgctgctgcttcagctggctcatcggaatcctcttcattctcgtcgttttcctcgccatcgccgccggcgtcctctacctcgttttccgtcccgaggagccgaaatactccatcgaaaacatcgccgtcagaggaat

SEQ ID NO: 86082 - DNA, 263 bp, Glycine max
  Clone ID: 700952791H1
tccatcttcaacttcaacacttaaactccttttagtttcaataatccacaccccaaaccccaaatctttccctatttattttcatcttagttttccctaggaccatatattataccatatttatatatcttcacatacttaataatatataataatgggtgttgtacggacgtgggagagcaggagggcggactggaggcctttcgccggagcctggtggcagccgccggcatccagcggcggaaagacgatgagggggggag

SEQ ID NO: 86083 - DNA, 264 bp, Glycine max
  Clone ID: 700952792H1
gtgctggtagcaacccattagaaatacatgggactgtatacactgtaatatgtatagattgtggatattccttttgccggagcttgtttcaggaccagttgaaggcccttaatccaaagtgggcagaagcaattgataacttggaccatggaaaccctggatcagataagagctttggcatgaaacaaagacctgatggtgatattgagattgatgaaagattttgggaggaggattttatcatcccaacttgtcacaagtgca

SEQ ID NO: 86084 - DNA, 251 bp, Glycine max
  Clone ID: 700952793H1
cttggtggaaaacagattgtgcatctaattccaaattcacccataaaaatacttccttttgctcaccagccatatattatgatggagggagatgagaatattcaagcatcatcaaagggaaaatatgttgaaagcttcaactgctcggaggcaccaaggaagaaaagcaagaagatagaaaacaagaggaggtttagtgatgaacagataagatcactagaatgcatatttgagtcagagtcaaagcttga

SEQ ID NO: 86085 - DNA, 262 bp, Glycine max
  Clone ID: 700952794H1
atcggaacaaacagggaatataagagagaaaaagatgggtttcataatggaattcgcggagaacttggtattgaagttgatggaggatccgaaggaaagggatcggaggttccgggagcacgtttatagagtgaaggacaggtgcgagaagacgaaggagatgtggagctaccctatgcgaccctatgggttttggactttcgaacgccacaattctcagcttgcttgggatgcacagattagccaagtggctgggaggagg

SEQ ID NO: 86086 - DNA, 264 bp, Glycine max
  Clone ID: 700952795H1
aaatagcccacccataaaccctctcattctaaaaccctctctttcgtttcattcagtgggaacctttctcaaacaccatgagtgcattcccgaacggttccaactcgagcctcgacaacctcctcctccaaactatgatgggcaggctccagctgcgagctccgataaacaaccccttggtcacacagtccctcgaggactttttattcaacgacctcggcgacgacgacgacgacggcggtgacaacgaggacagcgagaaag

SEQ ID NO: 86087 - DNA, 262 bp, Glycine max
  Clone ID: 700952796H1
ttgacatcctaaaactaagtaggccttttctagacaggctgaagatgtctcttcacgggatctgaaaccaatgcaacttactgatgaggcatttccaggtggtcctgaagatgtctcttcacaagatctgaagccaatgcaacttactgatgaagcgtttccaggtggtcctcaagacttgtccttgcttagatcctttaggaaccatgttgccacacgcctatggataggagaggaccgtcacgagttgaaggtggttaat

SEQ ID NO: 86088 - DNA, 261 bp, Glycine max
  Clone ID: 700952802H1
agctctcactctcactctcactccacataatataaatttctggttacaactcaacaagtccacaaacattttccaatctcaaatctctcatacttcttacgccacatacacccttctcttcatttctcactctccggaacatttttttttttaaaaaagaaaaggggaaaatagaaagaaaagaaaaagggagaaggagtgagaataacatgaacaaacaactcacgctgctctgtctctttatcctcttctcatttctca

SEQ ID NO: 86089 - DNA, 268 bp, Glycine max
  Clone ID: 700952803H1
catgcagctgcagctctttctccgagaagcaagaaaaaaaacgtgattcgctcttctcttcgaataaaccccaaaaccaacaaacgagaagaggagtgagagaagatggggttgtcgttcacgaagctgttcagcaggttgtttccgaagaaggaaatggggattctgatggtaggtctcgatgctgctggtaagacaaccatcttgtacaagctcaagcttggagaaatcgtcaccaccatccccaccatcggatttaatgttgaga

SEQ ID NO: 86090 - DNA, 256 bp, Glycine max
  Clone ID: 700952804H1
caaaaccacaatctaagtaagtgttgagagaagagtgcgtttgtttgtttgaaattaagtagtaaagatgtttggaatcatcggaggaaacaagggtcacaagataaaggggaacttggtgattatgcgaaagaatgtgttggatatcaacagcatcaccagtgttaagggtgtcattggaaccggcattaacatcattggaggtgtcgtcgacaccgttactgctttggcgtcccacatctccatccagctcatc

SEQ ID NO: 86091 - DNA, 255 bp, Glycine max
  Clone ID: 700952807H1
tcaagttgaaacatttgaaagatccgcttctgggggatgaagtatataaattgatgtgtgaattttggatgctgcctgcttctcaagtattagataagcgattgcattgaaacagtgcagacagtacttattgaccatcattgtgttgttgcttctaatggatattggtggtgacaaaatattatttaccagaaaattctgaaaaatctatgtagcttagatgaagtggatattattgaagtcctcaagtcttgg

SEQ ID NO: 86092 - DNA, 250 bp, Glycine max
  Clone ID: 700952810H1
aacaaaaccacaatctaagtaagtgtttgtttgtttgaaattaagtagtaaagatgtttggactcatcggaggaaacaagggtcacaagataaaggggaacttggtgattatgcgaaagaatgtgttggatatcaacagcatcaccagtgttaagggtgtcattggaaccggcattaacatcattggaggtgtcgtcgacaccgttactgctttggcgtcccacatctccatccagctcatcagtgccac

SEQ ID NO: 86093 - DNA, 247 bp, Glycine max
  Clone ID: 700952814H1
ctcgagcgaatcggctcgagtgcaccaataccagatctaaaacgagaaaattattgtgtttgggcaagtcatcaagggagaggatgttgtccaggaaattgaagaagtggatacagatgaacattacaagcctaaagtatctatcgggatacttgatgtgactcttaaacaaaaggtctgaaggttctctgctagatcaagatcataattagctgtgatacttagtcataacctgttttcggggaca

SEQ ID NO: 86094 - DNA, 248 bp, Glycine max
  Clone ID: 700952816H1
gattaatgcagatggcattatagagaaatcatttttgcccggaaagtactccattgagatgtcttcatccgtctacaagaattgggttttcactgaccaagcattaccagctgatctcgtcaagagaggattggcaattgaagatccctctgcaccccatggccttcgccttgtgatagaggactacccttatgctgttgatggacttgaaatatgggatgctattaagacatgggttcatgaatatg

SEQ ID NO: 86095 - DNA, 255 bp, Glycine max
  Clone ID: 700952817H1
gagcaatgggtgtgaactcttactccaacagcatgaagatccaagccgagatacaaatgccacccttagaaatccacaaggttcgtttgccaccagaacgcaccaccttgcagaaactcagacacagactctctgagatcttcttcccagatgatccactccacaggttcaagaaccaaacatgcctcatcaagctcctccttgcacttcaatactttttccccattttccaatgggcccctctctacaaccttt

SEQ ID NO: 86096 - DNA, 251 bp, Glycine max
  Clone ID: 700952818H1
caattattgtcgtaactattactcactctaatattctcatactcacagctactttatcatttttctccctttcttttcttcttctgttcagcttagacactcatttttattagttttgttgctgagtgtgtgtgaaactgtgaaagagagttatggcaggaggtggtggagctccagcacctaagattgatgagccacaacctcatcccccgaaggatcagttaccgaatgtttcttactgcagtacgagt

SEQ ID NO: 86097 - DNA, 254 bp, Glycine max
  Clone ID: 700952819H1
agctacttcaccactccaaacccaccacaccaccattattcatatctcattctctaacctttcactctgccttactcactctctactttgctcatcatcgtagatgaaccaacacttctagtctctcttactttataaccatgtaaaaatgagtcacctaatgaaaaattagtagcttcttgttgtgctttttattttgtttgtgttgagataaatttgtttgtttgtttggtattgttttgtgttttatgaat

SEQ ID NO: 86098 - DNA, 253 bp, Glycine max
  Clone ID: 700952821H1
caacttttcttcattttctctcttcctctcaccgagtcacgcactcgcctcgactcgtacggactccgatcccccccgagtcacactcagccagcaccaccgcccgatccgacgatgtctcgcgcctcttccgccgcctccgggagatcatgctgttcggggtcagagtcgtcgtcgattcgatgaggaagagcgtcagcatgaacaacctctcacagtacgaacatcctttagacgccaccaccaccaacaa

SEQ ID NO: 86099 - DNA, 254 bp, Glycine max
  Clone ID: 700952822H1
cgactgagtcgcggtctcttcccaactcggaactcagtccattccgcatttctcttcaaaccaaatttcttctgaagaaggagatttgaattcagaattgagtgagaagaagagaatagaaatgggctccgaattgattttcagaggccacgaggctcagcccgtggacgactcgtactcgccgaagccccacaagccctggttcaccgtgactcgcccgattcactacatgctccgcgagcagcgactcgtct

SEQ ID NO: 86100 - DNA, 254 bp, Glycine max
  Clone ID: 700952824H1
cggaatttcccacctggcctccgacaccgttcattacgaccctacagatctctattcctgggtccaaagcatgttaaccgaactcaaccccgaacccaacaacaacctcgatccatcttctttcttgatcgacaacaacaacaacatcatcaacagcacagcccctgtttttcgcgacgattccgaatatgacctcagagccattcctggcatagcagcctaccctcctcctcttcctcaagacaaccacctcg

SEQ ID NO: 86101 - DNA, 248 bp, Glycine max
  Clone ID: 700952825H1
ggagattcatgtggtggaaactcaacagtggtaagaaagcctctgtgcttagatgttgaaggacctttcaaatatgggatctaccaatgggcacttcctgtcatatccagcaactctttggctgtaaagattctttatcccattttttggggtttgatgaccctcagcactttcggaaatgatcttgaacccacaagccactggctagaagtgattttcagtatatgcatagtactcagtggactatt

SEQ ID NO: 86102 - DNA, 247 bp, Glycine max
  Clone ID: 700952826H1
ctcgagcgctttttacttcccctatggctcgtcactccttgctcttagccctcctccacttcgccgccgtggccaccgccgcgatggcggtgccgcgtccgacgccgacgacatcctgatccgtcaggtggtgccagatgttggcgaagcgaaggaggaggacaacctgctgaacgccgagcaccacttcgcgagcttcaaggccaagtgcgccaagacctacgccaccaaggaggagcacgatcat

SEQ ID NO: 86103 - DNA, 247 bp, Glycine max
  Clone ID: 700952829H1
ctcgagccgcggcttctgtttcctcttctatctgcaacagaatatacaacctttccttcacacacccttccctttcactcaccagcagcaacttccctcaaagacccgtatctcaaaaaccactcagtctcaacctcgagtcccaaagtttcgctctttcctttctcccacttcaccgtcttcccccacctttcgctgcctttgatgggttggaagtagctcaagataccacagagtcccaacaaga

SEQ ID NO: 86104 - DNA, 246 bp, Glycine max
  Clone ID: 700952830H1
gtggtttcagtgagtgatcggtgttcacttgatccttcataagtcgtcatcatcatcatcatcatcaccgttgattgaagaagatgccgatcagaaacatcgccatcggaaggcctgaagaggctactcaccccgacacgttgaaggcggggttggctgagttcatctccaccttgatcttcgtgttcgccggttcaggttccggcatcgcctacaacaagctcaccgacaacggcgccgccactc

SEQ ID NO: 86105 - DNA, 247 bp, Glycine max
  Clone ID: 700952831H1
ctttcgaaagattttatccaattgaaattttaaaaatgactgggataaacttaagaattcaattattgaaattgaataagtaaacaatttaattggattggtcgaatggtatcaaaaaaatggagtactaactcccatttcttatttattattgaattaaccgatcaacttgctttgttatcgaacatttctttttgatttcaaaaattttccggaaaaactttgaatctatttttatatgcgaatc

SEQ ID NO: 86106 - DNA, 247 bp, Glycine max
  Clone ID: 700952832H1
caacaccacacgaagcctttgttgcattcttctggctccatgttaccctccaaggacaaggagctttctgtttctgccagaaaactcgctgctacactgtgggaaatcaatgatttgcccccttcgagggtgaagaaggagttcgaggttgatccaatgagaggctgcaaggagaaggttagaagcagagagaagaagggtgtgggtttgtccagatcgggcttgttaaggccacagatgtcagatc

SEQ ID NO: 86107 - DNA, 249 bp, Glycine max
  Clone ID: 700952833H1
ctcgagcgaatcggctcgagatcgaaaggttgttaattttcacctcaatggttcttcactcaggttttgtttccatattgatactttttggcatggttttggtagttggggtgaatattgtcccaggggttgaggcaaaggcaagggctttctttgtatttggagactcactggttgacagtggtaacaacaattacttagcgaccactgcacgggctgattcccctccttatggcattgactatccaa

SEQ ID NO: 86108 - DNA, 257 bp, Glycine max
  Clone ID: 700952834H1
atgctatgctggatctgactgctcccagtttttatctgattgtcctgccaacgctgatggtggtgatccatattttatggagccattttggatgcaacatgcagcaagtagtgccattctagtatcaggatggcatagaatgagttattcttatagcgatggatcagtcatctcacaactattggttgagtacataaaaaaagttcatggcatcgttgggaatgcaatcaccgaaggaaagtacatcgtatttggaa

SEQ ID NO: 86109 - DNA, 249 bp, Glycine max
  Clone ID: 700952835H1
ggaaagcataatcaaatcaaccatggctacccttattgctcccatcaccttttcacctggtttagatgcagaagctcttagaaaagctttccaaggatgggggaccgatgagaaaaccgttattgcaatactgggtcatagaaatgttcatcagaggcaacaaatcagaaaggtttatgaggaaatttaccaagaggacctcattaaacgcctggagtctgagctctctggtgactttgagagagctgt

SEQ ID NO: 86110 - DNA, 247 bp, Glycine max
  Clone ID: 700952836H1
gagaaatgtttgcttattatcatcaaatggtttacaaacgagtttatctgaaatttctcaagatcaacattattggagcacttgttctactctttgcatttctcttcctcagttgtgtgtatgcacaagacacaacaacccttgtgcctgcaatcataacttttggtgattctgctgtggatgtagggaacaatgactatcttcccacccttttcaaggctgattaccctccttatgggagggactt

SEQ ID NO: 86111 - DNA, 248 bp, Glycine max
  Clone ID: 700952839H1
ctgttctctatatgtctctatttcttttctctctctataaatacgcagccttacaactcttcttaatcccatcaaatcgaaccctttttaaacgctcaaatacaaatttctggcaccaaatccttcccactctcctcaattccattcatttcaactcaacaatctctcagatccgtcaaacaaaatataaaagatagaaaaccctagttctgtaaatatataaaggaaaaaagctttttgctggtttt

SEQ ID NO: 86112 - DNA, 246 bp, Glycine max
  Clone ID: 700952841H1
atttaccatgtatccttggggatgcattgcatgaaatgtatgatggatgacatgtaaaatgggcagttgtggaaattaacgaaattttgggtccattttttttatatattatttcttttataggttcatcatcatcatcaaattgggacgttgttctcaggaaggtccaaaaagtcagtgcagcgaaaacggacgatccgaagaatacccttttcatctctctctacaataatcatcctcttcctc

SEQ ID NO: 86113 - DNA, 249 bp, Glycine max
  Clone ID: 700952842H1
cgtctcgagccgaatcggctcgagcgcgctcgagcttttgagcgaaactgcagtcgagtccttacgcttctggaggaacccataaggatggcctccatcctcgagccatccaagcctagtttctttccagcgatgacaaagattgttggcacacttggcccaaagtcacgatcggttgacgtgatttcccaatgtcttgaggcaggaatgtctgtggcaaggtttgatttttcatggggtgatcctgaa

SEQ ID NO: 86114 - DNA, 243 bp, Glycine max
  Clone ID: 700952843H1
aaaaaattaggcgtctaaagggccaaagcttagaaagttgaagctttttttgttgaggtgaaagtgaaatggttggcaaggataatctgagggctgaggacttgaacttgtgctttaagaagcttatgatggtggccgggagtgggaacagtgagaaaggggtgaacttgaaggttggggtgatcaccgagtggaaggatattcctgtggagcttctgatgcaaattctgtcccttgtggatg

SEQ ID NO: 86115 - DNA, 243 bp, Glycine max
  Clone ID: 700952844H1
gaggcattgaagcaagtgcctgagaaaaaccgaaagccatttgtgatctacatcaaggaaggcgtttaccaagagtatgttgaagttacaaaaaaaatgacccatgtggtgtttattggtgaaggggggaaaaagacacgaatatctggtaacaaaaacttcatagatggaacgaacacttatagaactgccactgtcgctattcaaggagatcactttgtggccatcaatatggggtttgag

SEQ ID NO: 86116 - DNA, 241 bp, Glycine max
  Clone ID: 700952846H1
tgctcgtggacagcagggttcatatccaatcaaattgttttatacctccaacatgcccatcattcttcagtctgcccttgtttccaatctctacttcatctcccagctgctccaccgtaagtacagcggaaacttcttcgtagatctattgggaaaatggaaggaatctgaatatggaggtggtcagtctgttcctgttggtggcattgcatactatatcactgcaccatccagcttagct

SEQ ID NO: 86117 - DNA, 242 bp, Glycine max
  Clone ID: 700952848H1
cactgaggcagattctttgtaaatgtttggatgtcaatccaggaaaccggccagatgtggtggatgtaaggaaatgcattcagaatatgttagtcaaaccgcaatttgattttctgggcaacttggaggtcacgataagtagggactacacaggaatctgcttggttctaggggagttgtgtttgttgcctaagcaaagttctaatgaactgattgaacatgagttgtgggagacagaaatt

SEQ ID NO: 86118 - DNA, 247 bp, Glycine max
  Clone ID: 700952850H1
gcaaaacccacaaaactaacagtgtatcaaaatttttgaacctgaaaattgttattttgatagggtttacagcaaatgcagcatagcctgcctcgtcacaaaatactgaacgccgcagctctgtggttgatcgacgcattcttcacttcaatcccacaatgtctataacgcacagcctcaccacttcactctcttcttcttcctctgctttcttagctccctcttccttcaattccagaggacaggt

SEQ ID NO: 86119 - DNA, 246 bp, Glycine max
  Clone ID: 700952851H1
ctctttctctctcttcaattcagcttcttcagcttcagcgaaatcctgttctaaccgtagatcgtgccttttcttttgtgcctgagaagccacttctctacttgcggttcttcttcttcttcttcttcaattttattcgattcgcttgctggaaaattctttgagtgagggagaggatgtctggtggcacacagaagagtctgagaaaagcacttggagcccttaaggacaccacaacagtctcgt

SEQ ID NO: 86120 - DNA, 242 bp, Glycine max
  Clone ID: 700952852H1
caagaatccccatagaaccaaaaagtaataaatcaaagcttcgttatcttcttcaaacccctggctgaatgaaatgtcgcaggtgaatgagcaccaccaccacgcaccctccacgccagggaaattgaagccagaaaaatccccatacaaccgcctccgtatccactcctctctctccaaactcactctctggtcctccttcttcctcgcattcatcctcttcctcttcattctgtcaccgc

SEQ ID NO: 86121 - DNA, 244 bp, Glycine max
  Clone ID: 700952853H1
aattaacatcagccctcactccttcgcacaccaaacccttccttcctatctctcactaatctaatggaatccgcagcactgtcgcgcataggcctggcgggcctggcggtgatgggccaaaacctagccctaaacatcgcagaaaaggggttcccgatctccgtgtacaaccgcacggcctccaaagtggaccagaccgtagatcgtgcccgcaacgagggctccctccctctcacgggccaat

SEQ ID NO: 86122 - DNA, 246 bp, Glycine max
  Clone ID: 700952854H1
ctagccttcttcaagtgttcttcctctttaatttctctatagaatacttacccttttctcaagactaacctctcgatccttctcaaaagaagaaaattaaaatggcaactgaaaagcttagaggttgtgcaaagttttttgcaagctctaaaccctacttggccatgatctctttacaatttggctatgctggcatgaacattatcactaaggtttccctcaaccaaggcatgagccactatgtcc

SEQ ID NO: 86123 - DNA, 245 bp, Glycine max
  Clone ID: 700952855H1
ctcgagccgaatcggctcgaggtttccctttcattttccctcactttctcgctcgccaaacgcccctctctctcctccactggccgaccagctcaccgacgaccagatcgccgagttcaaggaggccttcagcctcttcgacaaggacggcgatggttgtattactactaaggaacttgggactgtgatgcggtcactagggcaaaacccaactgaggcagaactgcaggatatgattaatgagg

SEQ ID NO: 86124 - DNA, 81 bp, Glycine max
  Clone ID: 700952856H1
catcccttgtattgaagaacaccctctttggatacccgtttgttaaagccaagacttttctcagttttgagaagaagaaga

SEQ ID NO: 86125 - DNA, 243 bp, Glycine max
  Clone ID: 700952857H1
caaagttgcagccccggttatttttattatgtttattccgatcatcatgttgcatagagaaaaagcaaggaagaataataagggagagagagtgagaggaagaagggaaaaccaaagacacttcctagttacttccctctgcagccataatagaataaccagcaccaccaaaggtgaatcatggttatttgcttgaagctcataataatgtggaatgtggcactgcttctggttttttctcta

SEQ ID NO: 86126 - DNA, 240 bp, Glycine max
  Clone ID: 700952859H1
tcctaatccagttatccataatttcataagcataaacgagaaattgagagagaatgtctcgtatctctacactctatcttctcgcttacaactcctttcaggccattggatggacgatttccttaactaagattttgtacaatcttctcgtcactgcatccatcaaaggaacctatgcttccgccgccagcttaatctgttttctgcaatgcgctgcattcttggaagttatacacggag

SEQ ID NO: 86127 - DNA, 239 bp, Glycine max
  Clone ID: 700952860H1
aaaagagaccagtgtgcagtgagaaagagattgctcacttcttgtgtgggtttgttttgttctttgtgttggaatttgttcatgggtgaagaaggagaagaggtgtcaagagacaaggaacaatacatgggagtttatggaaatgagtggttgtattgtggttgctctgcaaattggcgccgtttaagacaccagaattcctgttccatgccttttttcaagtgaaaaaaaaaaacaat

SEQ ID NO: 86128 - DNA, 240 bp, Glycine max
  Clone ID: 700952861H1
acgttgtttgccctaaccatttcacattccccgatttccctcaccggtttgtgttgagcagatagagagagatgaacccgctaacactagtgaagcgcactcagaacatcaatgccagagaagctgcactcggcatcggcgagcaagcctcctggcacaccaagtacaaggattccgcttacgtcttcgtcggtggcatccccttcgatctcaccgagggtgacctcctcgccgtttttg

SEQ ID NO: 86129 - DNA, 240 bp, Glycine max
  Clone ID: 700952863H1
ctcactccatatatatcaccaccctcaaccaaaccatagtggctcaagcactctatagcatatacttgcctttgtgaaattgaaaagatgaaaaaaccaaacactagtactagtggttcaccaaaacttgatcgcaaaactatcgaaaggaaccgcaggattcacatgaaatctctctgcttcaagcttgtttccactattccttccaatgacctcaaacccaccaaggacatgctttcc

SEQ ID NO: 86130 - DNA, 229 bp, Glycine max
  Clone ID: 700952864H1
tgctatccttgcggccttctacatttatgaggaagcttccacctaagcgtggtatcacacaatatcacccaattcgctgaaaaggggatttatcaatcgttcactattttcttgaatgattatcactctccaagggtaattttttagagtagagacaagtcagtcttctatgttcggtggcaaagcttgtatgctttgtctctagaacattatggtttagttttgcgat

SEQ ID NO: 86131 - DNA, 242 bp, Glycine max
  Clone ID: 700952865H1
ggcaatttgtggggcttgctgagatgattggtcctgttgattttaacaagagtgttgagtattggcagcaagacaagtggaatggttgctttcctcttaagtggcacattgttaaggatgttcctaacaatttgttgaggcacattaccttggacaacaatgagaacaaacctgtcactaacagtagggatacacaagaggttatgttggagcctgggctgaaattaattaaaattttcaag

SEQ ID NO: 86132 - DNA, 243 bp, Glycine max
  Clone ID: 700952866H1
ggtttcaatttggagcacatccctgcttgcgtcgttcctttctttctctaccttttcggtctctctctctctctctctttccaagtacctgtataatatgcaaagagacagaaagaagggcagtaagtatcctcccggggagtcttctaatcctcaatcatcagaaaaagatgatcacaataatgatacaaatcttgctgaaggatctagtaaaccagagctgagtaacaagaatactccaca

SEQ ID NO: 86133 - DNA, 237 bp, Glycine max
  Clone ID: 700952867H1
atacatagctatctatttatctatagcaagtgcgtcaagagacacgtggtaccctagctagagtgccattctgtggtttctttctttctttctttctgcatcacatcacaatttgcattgcctcgtgtcctttttcttctttgctctccaaaaatctcacacacacaggtatctagcaaatgggttctcaccaacaagaaccatggctattggagaatgggaaaccaagggttttga

SEQ ID NO: 86134 - DNA, 237 bp, Glycine max
  Clone ID: 700952868H1
aagacatataaggaagtttatgatgaagttctgcatatgagttctgctttacgagcatctggtgccgaaccaggcactaaaattggaatttatggatctaattgcccggaatggattgtggcaatggaggcttgttctgctcaaagctttgtttgtgtgcctctctatgacacccttgggcctggtgctgtaaattttatcatagatcatgcagaagtagattttgtgttcgtccaa

SEQ ID NO: 86135 - DNA, 226 bp, Glycine max
  Clone ID: 700952869H1
gaacttcccacgagtggctttaactggtctggtctggtctggtcggacacacaaaaatattagtatggcgaaggtgagttttgtgaagaatggagagcttagattgcctccggggtttcgtttccacccgactgatgaggagctggttttgcagtacttgaagcgcaaggtcttctcctgccctctgacagcctctatcattcctgaggttgatgtttgcaagtct

SEQ ID NO: 86136 - DNA, 241 bp, Glycine max
  Clone ID: 700952871H1
ccgagcttactggagtatgcatgagacttgaagatgaaagtgatgcaaacagcttggagattaaacagatgacagaaagagtctgtctactggaaagtgaaattggaggactgaaagggcagttatctgcatataatccagtcattagttcattgaaagaggattttgcttctttagaacacactgccctagttcggataaacaaaatgcctgttgaatgcaatcaagaacaaaaggatgc

SEQ ID NO: 86137 - DNA, 242 bp, Glycine max
  Clone ID: 700952872H1
atttcatgtcacggaccagcaaggaaaaaagataacagatagcaaaaccatcgacctcattgaaaaggctctaggaccaaagagcaagagcacagaaggggtgaaaaattggccgagcaaacacgttggagtgcattctgttggtgattatacagccattgagctaattggcagagaccgcccaggtctcttgtctgagatttcggctgttcttgccaacctccattttaatgtttttgcag

SEQ ID NO: 86138 - DNA, 236 bp, Glycine max
  Clone ID: 700952873H1
ctgaattgtgttgtgttgcaaacagaaaggaaaaaagaagaaaataagagaaagaagaaaaatatgagttacttgaatcgtgtttggatggcggcaacggtggcggtagcgcaaggccacaccgatcccggccacaagtgcaagacggcgctcaactccatccaccacaaccggagccgcctcttctccggcggaccctgtctgatctccggccgctgtccggcgtcgttggacct

SEQ ID NO: 86139 - DNA, 235 bp, Glycine max
  Clone ID: 700952874H1
gctctctgagcacacctccactctgttcctcagattcatcaccaccttgcgttgcgccaatgggaaaagcattcgacatcggagccgttccgttcaacgccgaggggtggggtccgccggacagcaccaccaccggcagcaacatcaacctccctctgaacgtccccttcgcccccttctcccgctccgacaaattgggccgcatcgccgactggactcgcaacttcaacaaccc

SEQ ID NO: 86140 - DNA, 233 bp, Glycine max
  Clone ID: 700952877H1
ttcgttattctttgttaagttggtgaagtcaagtttgcttgcatgatttggggaacacaatgagatagacttttgcctcatagcctcctcccattcattttgttcacttccaaaagatttttaggtgcaaaaaagagtttttttttttatattttttttggggggcggcggggggtaaggaatgactgtgacaaagaaaattttcacaatttacggttaagatgttaccgtag

SEQ ID NO: 86141 - DNA, 233 bp, Glycine max
  Clone ID: 700952878H1
gactccttcaactagtactgcattctttcttttcttcaaatggtagcaagaggcatcaagagcaaaagacattgttaatttcggagatggcgagttacgaggctattaagaactttgatgatgatgatgatgaagatgtggagatggcactcctccataaccagatctctgaatcaagatctgccactgtttctcccaccattgcccaaactaccccgcttcaccttcacatc

SEQ ID NO: 86142 - DNA, 224 bp, Glycine max
  Clone ID: 700952879H1
acatggcatagtattttgctattcaccaatcaccatcttcagtcactgtttttatagctaggggaataatataactaatacatatttggaggactggattatgtaccaaatagaactcagtttgacatgtccaagagcaaattatttaattcagaactggaggaatgaattttaatttgatatgatgtctgtctattattggtaacatttgcatgttaaaagaa

SEQ ID NO: 86143 - DNA, 236 bp, Glycine max
  Clone ID: 700952880H1
caattccctccccttccgttcgatgttcattttctccactctctcctcagatctactttctctgcatcgcatccatgccttctcattctcgcatcctcaaccaccgccatcgctctctccctctccacctctctcgccgcaaacgcctctctctccctccaaccacgtccctcgtctactctccccgttcccgcttcgattgcgctagtctcgagttacatccgttgattattccg

SEQ ID NO: 86144 - DNA, 224 bp, Glycine max
  Clone ID: 700952881H1
ctcactactgatagattttcattcctccgaggaaaaaaaaaacatgtcggatgctttgatcaatggattggccggagctggaggagggatcattgctcagctcatcacatacccacttcaaactgtaaacactcgccaacaaaccgagcgtgatccgaagaaagacacgaggagtcaaggggccctcgaacgaatgtgccaggttgtaaaagaagaggggtggg

SEQ ID NO: 86145 - DNA, 227 bp, Glycine max
  Clone ID: 700952883H1
cttcctctctgcagagtgcagagctttctctccccgttgcttcactcattctcaacaacaaaccaatctttcttagaaaatgagggggggcttgtggcaacttgggcaatcgatcactcgccgtcttgcccatggagataagaaggctgttgctcgtcgatgttttgcctcagaagctgagctgaaaaagacagtgtttcatgacttccatgttgctcatggtggga

SEQ ID NO: 86146 - DNA, 210 bp, Glycine max
  Clone ID: 700952884H1
gtttagcttagcttcaatggcctctgtttcagcaacttctctcagcttccaaccctctctcaagttgtctacaaggactagccaggggtgttacaaaacttcaagtttggaggtagtttctgtgggatggaataggagaacctttccctctttgagatcctcccgtttctgcatttgtgcagtcaaggcacaaccggagacagtgcagaa

SEQ ID NO: 86147 - DNA, 230 bp, Glycine max
  Clone ID: 700952885H1
tggagtttgttctaaattacctaaatgccactgccattggagttctttctataaccctcttctttttgtttttgtataatcccttcaaatttgcattaggtaaaaaagaggctcccaaagttgcaggtgcatggccaatacttggtcacctaccactattgagtggttcagagacacctgatagggttttgggtgctttggctgataagtatggacccatattcaccatc

SEQ ID NO: 86148 - DNA, 237 bp, Glycine max
  Clone ID: 700952887H1
gtttcttcttcttcttcttcttcttcttcttctactactactactactacttttcctccacaaaatgatgctcagaatcaagagggttcccactgtcgtttccaactaccaaaaagacgacgctgcagactctcctcgtcccgtcggaggttgtggtcggaattgcctcaaagcttgttgccttccagatgcaaagctgcctttgtatgctttcaagaaggctaatggaaaggattt

SEQ ID NO: 86149 - DNA, 236 bp, Glycine max
  Clone ID: 700952888H1
ggaataaagtcctccaagattctccttaatttctaaattaaaggattaaaacaagaaattactcgcgagtattacttaataatataccttaacctcgcaaaatatcaaacttatcttacaacatttcttttcacatctatcaaagaacataattgatgtataaaatatttagaagatcattatagtgttgcgggtatgtttaagtgtgaagtatcttttcaataaaaacaattatt

SEQ ID NO: 86150 - DNA, 227 bp, Glycine max
  Clone ID: 700952889H1
cgaggggcaccctgacaagctctgtgaccagatctccgatgctgtgctcgatgcatgcttggagcaggaccctgacagcaaggttgcctgtgaaacctgcaccaagaccaacatggtgatggttttcggagagatcacaaccaaggccaacgtggactatgagaagattgtgcgtgacacatgcaggaacattggttttgtctctgatgatgttggtcttgatgctg

SEQ ID NO: 86151 - DNA, 231 bp, Glycine max
  Clone ID: 700952890H1
gcttcagctacagctgctatatcagaagggcttcatcctgcattaccatcaaagaacaagggtaagcaccagcagtctgaagatgcctcttcattaattagtagtatgaatcccacacagactcccaagtctgttgaagatgacttctttactacagccactgatgcattcagccatgctcatgttgatgccgagtccaatgtaattgatttcagttaccttgaaccacct

SEQ ID NO: 86152 - DNA, 228 bp, Glycine max
  Clone ID: 700952893H1
cttctcataataaacttggtgggggtggttgctggcatctcctatgccatcaacagtggctaccaatcttggggacccctctttggtaagcttttctttgcattttgggtgatcatccatctataccctttcctcaaaggtctcatggggcgccaaaacagaacaccaaccattgtggtggtgtggtccgttctgcttgcatccattttctcactcttgtgggttaga

SEQ ID NO: 86153 - DNA, 229 bp, Glycine max
  Clone ID: 700952894H1
caaacgacgaaagaatacatgaagatgccagcattaacaaaagaacaaggttaaacccattattatactcacttgaagatcactttccacctcaaagggactctgacatgagcacttcacaccaaagcaatggccaagattcgtgtggtcaatcctcccaaagcaagcttcatgaagaatttgcaaacttacttaagcccgttagcataggcaataatcacttacaaca

SEQ ID NO: 86154 - DNA, 232 bp, Glycine max
  Clone ID: 700952895H1
aattgattacaaaagtttatgtagaaggctagacagagaattggacaaactcactatggaatatgaaaggcagcagaaggtatttgaggatgatattgaaagattgaccacagaagcacaacattgcatattagaggcccaacagaattattcggattcgttggagaaggaaagattgaaataccagaaagactataaagaatcaattaagaggcttgaagagaaggtaatg

SEQ ID NO: 86155 - DNA, 232 bp, Glycine max
  Clone ID: 700952896H1
agctcactctcttccgtttctttccctataaaattaactccttaccttcctccaatatttctcttaatcatacttaacgtgcactcaaccacattcatcacaactcacacccttcataagctttgtgttttttcgtagaaacaaagatctgatcatgacgatgatgagcagcagcaacaacaacgttggagaatttggagacaccactctgaccaaggtttttgttgggggc

SEQ ID NO: 86156 - DNA, 262 bp, Glycine max
  Clone ID: 700952901H1
aacacttggtgattggacccggagtctcaaagtcaagttctcagagtgttgccagccaccggacaacggcaagagtggacttctaagagctgaatacttgcaaggagatagaagtccgagtactctccctaaagttctaattgacggtccgtacggagcaccagcccaagactacaagcaatatgaggtggttttgctagtggggctaggaattggagccaccccaatgattagtatacttaaggacatagtgaataacatg

SEQ ID NO: 86157 - DNA, 262 bp, Glycine max
  Clone ID: 700952902H1
cacttgttctgcattgaccatagcttctctctttctttcctaattaatccttccatgcaaacaaacgctgtctctcatactcgtagtgacacacacagcttagtttcgttgtattgtatgtgtcctttctcaattctcatcatatatctgttcaagtaccattatctttctatgttgagtgtcggcattttttgagtttctcactaccacttgttctttttttctgatacatgcatatatatacgtccaggtatacagtcta

SEQ ID NO: 86158 - DNA, 258 bp, Glycine max
  Clone ID: 700952905H1
taaaggggtgttttgaaaagatggagcacagagaagatcatgctagaaggaaaaagggatggctcatcacgatgcccttcatctttggtaatgaggtttttgagaagctggctgtggtaggtttcaacacaaacgtgattagctacttgacaacacagcttcgcatgccattgaccaaagcagctaacgccctcactaactttggtggaactgcaagcttgacaccattgcttggtgctttcattgctgattcttatg

SEQ ID NO: 86159 - DNA, 91 bp, Glycine max
  Clone ID: 700952909H1
tgagtagcagaagagaagagaagatgggatctgtatgtatctgagactgtgcatcaccccattccctgttgcggttgattcttgacgacag

SEQ ID NO: 86160 - DNA, 259 bp, Glycine max
  Clone ID: 700952911H1
cttgaaagccaaaacaaaacaaacggggttttggaaatggaacgagaaaatctaaactgggaaaagaaatgaaagcttaagcctttgagtctgagagagaagagtggggactggagaatgaatagggagtgttggcgaagtagatctgaaaggtgaagaatttgagtaggtaaaacccaaagttttcaactttgaatcaaagggtcatcaaatgctttaacgttttggttttttctgccttccgacactctaagaaaat

SEQ ID NO: 86161 - DNA, 257 bp, Glycine max
  Clone ID: 700952913H1
ggttcgaaggtgcaaagcaaggaagctgaaataactaaatgattctgaattcttgttccatgagtccacaacctctgtcacctcacaatttcagagacctcttcgattccgtcgaagcttttctcttcgactgcgacggtgtgatttggaagggcgacgaactcatcgatggtgttccgcaaactctggacatgcttcgcgccaagggcaagaagctcgtcttcgtcaccaacaattcctggaagtcgcgttctcag

SEQ ID NO: 86162 - DNA, 257 bp, Glycine max
  Clone ID: 700952914H1
catcaggctataacaattttcgagggtactaatactattacccattaacaattagtggatgataatattttgttcataaactcacgtgtgggatttgaaatgtgaatgcatcaatttgtgtttgtattattttttttttaattttaattgaagggagctagtggcaaatcatggtcttaatagatgagttcaagattaatgagtttatggtactcttcgctgtcttgatttgggtatgattgtgtgtgtctgtgaaa

SEQ ID NO: 86163 - DNA, 259 bp, Glycine max
  Clone ID: 700952915H1
caactttcgcccaacgtgactcctgtgaacgagtcttatgttccaccagagaggccaaagctgcaaagaaaactcagcatcttagatagaaccgaagctggtctaatacaagctagagctgcaattagtgaagcaagaaacggagatcgaacgcaagacaaagactatgttccagttggacctatgtacaacaatgctaatgcatttcacaggagttacttagaaatggagaaacagttcaaagtatttgtctacgaag

SEQ ID NO: 86164 - DNA, 259 bp, Glycine max
  Clone ID: 700952916H1
caaccagcaagacccatatatgctgagcaacttccagcaggtctacagacaatttcaaatattgtggctgtgtccagttgcaaggggggtgtgggaaaatcaactgtagcagtaaaccttgcttacactttggctgatatgggtgctagagttggtatatttgatgctgatgtttatggtccaagcttaccgactatggtctctcctgaaaaccgactgttagtaatgaatccagagaagaagaccataattcctactg

SEQ ID NO: 86165 - DNA, 96 bp, Glycine max
  Clone ID: 700952918H1
tgtagaataaactatggaactggatcaatatctggtttcttcagtcaagataatgttaaagttggcagtgctgtggtcaagcatcaggatttcatt

SEQ ID NO: 86166 - DNA, 260 bp, Glycine max
  Clone ID: 700952919H1
ctttcctcctcttccttgtgatttttgtttgcatcacagggagaaactgagacacagaagatgagagagataattagtattcatattggacaagctggaattcaggtggggaattcatgctgggagttgtattgccttgagcatggaattaaccctgatggcaccatgcctagtgatacctcagttggtgtagcacatgatgctttcaacaccttcttcagcgagacgggatccggcaagcatgtgccaagggctttatt

SEQ ID NO: 86167 - DNA, 262 bp, Glycine max
  Clone ID: 700952920H1
cgcgaacttcaccacttagacctgaccggcgtggtcattttggacgcccgaaagccctccgcactccgccaccttccgccacgcgttctcagcagaacaaacaccaacaccaatttgatttacacgaaccggttctcgggcccaccgaggcccaattccgcttcctcaacgggcctgtccatgataaccgtcgaggacgatatcgagtctcttttctccgagacgaactcggaggaggagcggcgcgtgaggaagcaaccta

SEQ ID NO: 86168 - DNA, 91 bp, Glycine max
  Clone ID: 700952921H1
cttttggagccactcaaagcggagtttcctattttgagctacgccgatttctaccagttggctggcgttgttgccgttgacgtcaccggtg

SEQ ID NO: 86169 - DNA, 259 bp, Glycine max
  Clone ID: 700952923H1
ggaggacttatggactatgcatttgagttcataatcaacaatggcggcattgattctgatgaggattacccataccgtggtgttgatggtagatgcgacacatataggaaaaatgctaaagtcgtttctattgatgactacgaagatgttcctgcctatgatgagttagccttgaaaaaggccgttgcaaatcagcccgtgagcgttgctattgaaggagggggcagggaatttcaattatatgtatctggtgtattca

SEQ ID NO: 86170 - DNA, 96 bp, Glycine max
  Clone ID: 700952924H1
atccgttttgcccccattggccaattcggccactcttctctgaaaaaggctccagcctccttcttcatccatcttccctctccaccaaaatcctcc

SEQ ID NO: 86171 - DNA, 93 bp, Glycine max
  Clone ID: 700952925H1
ccctttcttaggttaaaagttggaactgagtgattacccaactaatgttatgatcagttggaagcgctggcaagaaagagtacgtaatagtgg

SEQ ID NO: 86172 - DNA, 93 bp, Glycine max
  Clone ID: 700952926H1
gcatgaaatggtgcattcctcgcaccgtgcagaagagtagtctcagagccacacttttggaggctacggtggaaaggcagaaggttcagttgc

SEQ ID NO: 86173 - DNA, 257 bp, Glycine max
  Clone ID: 700952928H1
gcacttgcaagtgaggtgttgggagagcaagcttcaagcagagatagcccttaattaggaataatgataaactattaatgtgtagctaaaaacttatgtattatgtctgtgatggttttcgtgcactctggtgttttgtgttaaacaaacatccttagaataaagtggtcatgtcttgcctttcagcaagttcaagtgttttggacttgtgatgggtgtgttaagctcatggttgcttcttttttttttttttaaat

SEQ ID NO: 86174 - DNA, 137 bp, Glycine max
  Clone ID: 700952929H1
tatgcagataaggcgtacatagagtttcatgatgaatgctggggagttcctgcttatgatgacaagtaagttctaagcactgaatagtactcccttcattttaattcatgagctttttaaaagttttaagattttat

SEQ ID NO: 86175 - DNA, 254 bp, Glycine max
  Clone ID: 700952930H1
gtggcctagttgttgtttttctcaatgagaagggtttccactatgcattgcgcactttggcgcttctgtgttcccttgttgctacttgctagcttcagttatgctccttttgttttggccactgaaatttcagggaatgaagtgagcactgatggaaaggttttaaatgaagagttagcaaaacctaatctacaaggacatgatgaagaagcaaagtttaaaggatttattccaaagcgcattcccatagtgaa

SEQ ID NO: 86176 - DNA, 210 bp, Glycine max
  Clone ID: 700952931H1
aaattaatggttaacttctccaagttaatttgattttatggaaaagttaatttttagattaattattagttacttggttttgccatatatgtacaatatcatcactaggtcaggtttctcttgcttgggatatttatttctttctctaacaggtctagctagtactaatggaaatgtggtagcccctctcagcattttgaaggctttggt

SEQ ID NO: 86177 - DNA, 263 bp, Glycine max
  Clone ID: 700952932H1
cacctccaccgcttctctctctcgggttcggatctccgatcgccgccgcaccgcgaaacgagtttccaaactcagaatccagatccctacttcaacaaacaaacaaacatgattgcgattccgtatttaaccgccttaaccacctacttcagctacgggttgctcttcgcctttggccagttcagggatttcttccggaaaatcttcgactggtgcagcgccaacactctccagggttacgcgccgatctgcttagggctcga

SEQ ID NO: 86178 - DNA, 96 bp, Glycine max
  Clone ID: 700952933H1
catatctccatttccatttcctctctctcagtttccaagaatcttaagctatgggaaagtcttacccaaccgtgagagcggactaccaggaggtgg

SEQ ID NO: 86179 - DNA, 210 bp, Glycine max
  Clone ID: 700952934H1
actctctctctcactgcaattgcaaagcaacaacattccttttctccacttcgaagcaacgcaacattctctctttgcgaggttgaagtcgtcgtctttcgatatccgccctaactctttagatgacttggcaacgttgtgtgggaagtaaaagttgagagctcagcacaacaattaccagaaccataattgaacgggtcaggacaggtt

SEQ ID NO: 86180 - DNA, 85 bp, Glycine max
  Clone ID: 700952935H1
ctacaatcagcggtgatttttgtttataataggaggatctgacgtactcgctcgtggatctcagctgtattcacgatcatgatgg

SEQ ID NO: 86181 - DNA, 251 bp, Glycine max
  Clone ID: 700952937H1
cggggaatcaagtcaagtattgggcatgtcacgaattcgctgtattctgcgtggtttggatgtgaaaacctatatattcatgtttgctgttatcccaatgtgcgtctttggattctatatacacgggcagaagatctcctactttctgcgaccgctgtgggaaaaagcacccaagcctttcaatgtcatccctcattactataacgaaaacatcaccatggagaatctctgcagacttcatggctggggag

SEQ ID NO: 86182 - DNA, 259 bp, Glycine max
  Clone ID: 700952938H1
ctcgagccgaatcggctcgagacaaggcagaaagcaagctcatcctagagttttaaaaatggcagcagcctcctccatggctctctcttccccatccttggctggcaaggccgtgaagctgggcccatcagcccccgaagtcgggagggtcagcatgaggaagaccgtcaccaagcaggcctcctccggaagcccatggtacggcccagaccgcgtcaagtacttgggcccattctctggcgagcccccgtcctacctc

SEQ ID NO: 86183 - DNA, 257 bp, Glycine max
  Clone ID: 700952939H1
ctctttgttcctttcttcctctcactctcaccatgattacagtaagcgtaagatggcaaaaggacattttcaaagatgtagaacttgacactacccagtctccttatgtttttaaatgccaattgtatgatttgactggtgtgcctcccgaaagacaaaaaattatggtcaagggtggtcttttgaaggatgatgctgattggtcaacagtaggggtgaaagagggtcagaagctagtgatgatgggtacagctgat

SEQ ID NO: 86184 - DNA, 94 bp, Glycine max
  Clone ID: 700952942H1
tcgaggcagcacgaaaggccattgaagaagcacctccagttgttaaggagactcctgttataattcaaggtactgaggaggttagttcattatt

SEQ ID NO: 86185 - DNA, 257 bp, Glycine max
  Clone ID: 700952943H1
gggagattgtttttctgttccatttctacgaactcagacccttcaatcccaaccgagaaaaaaatcatgaagctgaagacatatgcgggtcttagtatcattgcaactctggctattatatatcatgcatttaacagtaggggccagttttatccggcaatggtgtatctgtcaacttccaagatcagtttggtgcttcttctcaacatgggtttggtctttatgtgtattctatggcaattaaccaagaagttgtt

SEQ ID NO: 86186 - DNA, 205 bp, Glycine max
  Clone ID: 700952945H1
cggatataaacaataaaataaaataaaacagaagagaaggaaacagaagtaggaaaaaaataaaatgggttacacaagatcttctcttctgtccgtggctcttgtcttggcattctgttcaagcattcagggtttggacatcaccaaattgttgggcgaatatcccgaatgtgcacagtagaccaaatacctaactggaaccaag

SEQ ID NO: 86187 - DNA, 258 bp, Glycine max
  Clone ID: 700952946H1
ctcgagcgaatcggctcgagggaggcactgcaatcatgggaactctcatgtttggtgactggcactttgtctcagataacattgaatatgccaccaggcacatttgcttccaaagttgcattgtggacaacagttattaacccgttgactaaatatgctttgttgatgaacccactggcaaggagtctagaggagttgctgccagatagaatttcatcctcatattggtgcttcattcttcttaggacaacacttgtt

SEQ ID NO: 86188 - DNA, 253 bp, Glycine max
  Clone ID: 700952947H1
gatttcccttcctttttgacttatagcctctgctccccttttgcggggtccttcaatctcacttggggaacctccgtgcattaacccaaaagagttcatggacccttaattaagaaatattttgcctagaaccagaacctgcccttactctataacatttaccaaccgggaattcttcctggacgttttgtgttttgattctagacacttggaagaagagtgagttgttttccttgttttgcaaagactaaga

SEQ ID NO: 86189 - DNA, 261 bp, Glycine max
  Clone ID: 700952949H1
aagcttctctgttaaaaaaaaattaggcgtctaaagggccaaagcttagaaagttgaagctttttttgttgaggtgaaagtgaaatggttggcaaggataatctgagggctgaggacttgaacttgtgctttaagaagcttatgatggtggccgggagtgggaacagtgagaaaggggtgaacttgaaggttggggtgatcaccgagtggaaggatattcctgtggagcttctgatgcaaattctgtcccttgtggatgat

SEQ ID NO: 86190 - DNA, 94 bp, Glycine max
  Clone ID: 700952950H1
atccagaaggaatcaacccttcacctcgtcgtccgtctccgtggtggcgtgcagatcttcgttaagagcctcaacgggaggactgtgacgctag

SEQ ID NO: 86191 - DNA, 260 bp, Glycine max
  Clone ID: 700952952H1
ttttggaacagaagtctggattatacacgtccccatttggtagaattgatgaattcaacaggggttctcatttcaaatttaaccttcttgaattctccattttggacaatccatcctgtatattgcaggtttgtcccccactgaaagattgagtttatatattattccttgttttccgtagttcaagtacttccattgcctttttaaaactgtgcaatagaggagctttcatgagtagggggagatttgagactgttttt

SEQ ID NO: 86192 - DNA, 258 bp, Glycine max
  Clone ID: 700952953H1
ctctcttacacaccgaagcactgctactactactactttctctctagatatgggttctggtgctgtgcaactgtttctgatcttggggctcttggctagctcatgcttagcccaagcaccaggtgctgcaccgtcacaaccacccactacaaccccatcaccaccaccacccagatcagcacctgcaccagcacccaccacaccagcaaccccaccaccagcaaccccaccgccagcagcaactccaccaccagcagc

SEQ ID NO: 86193 - DNA, 257 bp, Glycine max
  Clone ID: 700952954H1
atttgcctctttctgagagacacaacatagatatgataataagtgacacacttatctaaatggctgccacgtgctgtagcttcactcaatcgtcttctggtttcaggaaactccatgagagcattcagctgcagagctacttcacaaggtaccagcgaagatcaacttgcagtgttgaaaatatcttccatagggactatggaggaaggttgttacaagttgaaggatggcatcaacatcagtatttgttatgtgca

SEQ ID NO: 86194 - DNA, 260 bp, Glycine max
  Clone ID: 700952955H1
gaagctcacaaaacatctctaaacgcttgtgaagatctccatctcccattgatcctcctgaagtttttgtattcaaccatggctacctatagttggtcaactgagatattttcatttttggttctaacgttgttgtcgacaagcagtcacacaatggttgctggagcacgcaatcttctcgagtcaaccttgtcaaaaccagaagtgcgaacacttcccaaacctcatgggttgcgaccattgccggagatccctgaatt

SEQ ID NO: 86195 - DNA, 123 bp, Glycine max
  Clone ID: 700952956H1
ccaccacacaggctccacaaaacatctcatcgttcacccaacaaaatggcgctgcttctgataattcccatctcactggtcaccctctggctcggttacaccctatgccagcgattaagattc

SEQ ID NO: 86196 - DNA, 78 bp, Glycine max
  Clone ID: 700952957H1
aaagatttcacttttgtgcaaaaggttttgtctttacgaagtgtgttgtgtagtgagtcctgagacatcccatgggag

SEQ ID NO: 86197 - DNA, 136 bp, Glycine max
  Clone ID: 700952958H1
cttaaatcttcgcgtccagcaacttcattaccaaaccaaagaaggtttaggaagtgtagaagacttgttctctaacaatggcattggcaagggttgctagggccaacctgataagatcaggaggtgcttttggcag

SEQ ID NO: 86198 - DNA, 249 bp, Glycine max
  Clone ID: 700952960H1
gcgaatatatatcttgtttcgtcccttaattctctccttacaaactcagtggttcttttgctcaagatttctgaactcagcctctgattcccaggaaaaaaaagtataaaagcaaaaatcagagtccagaagtaataataagcggcaaacagaagacatagatcagcacaagaaaagcagaggaagatgggttttctaggactattgggggtggcgtctatgccggttattcaggtcctagtgatcggt

SEQ ID NO: 86199 - DNA, 255 bp, Glycine max
  Clone ID: 700952961H1
ggttgtggatagtggccccaatgatcatatatttatatactactctgatcatggcggtccgggagtgctagggatgcctactaatccatacatgtatgcatccgatctgattgaagtcttgaagaagaagcatgcttctggaacttataaaagcctagtattttatctagaggcatgtgaatctgggagtatctttgaaggtcttcttccagaaggtctgagtatctatgcaacaacagcttcaaatgctgaaga

SEQ ID NO: 86200 - DNA, 260 bp, Glycine max
  Clone ID: 700952962H1
tcaaaatcgttctcagatctatctcaaatgagtaatttgagtaatctgaaggagttgcaaaagcaagagagtcctttcaacaagagaagaagggttttgattgcatccaagtggtccagaagatcatctttctattcctggtccaacccacaatccatgcctcttttgcctgtggatgaggatcaggattatgattatgaagaggaagaagaagaagaagatgacgaagagaaagctagaaaagttccctctgcttcatc

SEQ ID NO: 86201 - DNA, 235 bp, Glycine max
  Clone ID: 700952963H1
atcggaggacaccaaatctcacgagttaactgagactcatgtgagttcgatgaacaagaggttggttctcaagttgccagatcgtgatatatccaggtccacaagtggttttggcgaccatgctgaggtggttggctcatcatcaaaaactggacaagaagctaccgatttgaatggggacgcgccgccatctagtgattcggctgtattgttctgggaggtacgagttgccctg

SEQ ID NO: 86202 - DNA, 269 bp, Glycine max
  Clone ID: 700952965H1
gcgtacgtgagctcgcggtaattctgctcgatgactaatctatgtttcttttgttttgaattcaatactcagtgctttgattgtgcattttgcatcagaagcaggcactgctgagtcacagtatggaggccaaaagctcaaaccagataaaagaggaaagcaatgattccaattgtgataggaaagctgagataagagcattagatgattcgaaaactggtgttaaaggtcttgtaggttctggtgtgaaaaagatcccacgcgtgttc

SEQ ID NO: 86203 - DNA, 92 bp, Glycine max
  Clone ID: 700952966H1
gtccgaggaacaaccacgtgtatgggaaggagttccagtccatgctggaaggactcgacgaagaacggtgcgtggaagaatcagggcgccac

SEQ ID NO: 86204 - DNA, 255 bp, Glycine max
  Clone ID: 700952968H1
gccatttactttcctcaacttcaatttctctagctagctactagttcagtgttcagcatatgtgaaatgaaatgagaagaaccatgtcaaatgcatcagcatgcttctttttctttgcttttgtagtattagtagcacttcataatgctgaatgccgttctcttcggcctagtgtttctgatggggttgatgcagttcaattacctcaagagtcttcttatctacaactcaaagaccaaagtgttgttgtcgagt

SEQ ID NO: 86205 - DNA, 250 bp, Glycine max
  Clone ID: 700952969H1
cagaagctgaagaccaccaccaccaccaccaccgattcggaatcgcaatcgcaggcgcttctgcgtctctacctcaccaacgccctcttcttcggggtgttcttctccgtcgcgtacttcctcctccaccgctggcacgagaagatccgcaccgccactcccctccacgccgtcagccacgccgagagcgccgccatagtgtccctcgtcgcctccggcgtctaactcctcggcttcttcggcgttgcgt

SEQ ID NO: 86206 - DNA, 256 bp, Glycine max
  Clone ID: 700952970H1
cgcttttgccaaatctcgctatgcttctcttctaacctctcaccctcgctctctttctctctagggtttcgttctcattctagattcccacatacaaactgtttctgcgttatttgattcttctcccaacctttccttgatccggattaagattcctggcacgtttttgaaccgatccacttcatatcggatccgaattcgaacattcaacatctgattccgcaattctctccgaattttgctttgaatttgcttt

SEQ ID NO: 86207 - DNA, 88 bp, Glycine max
  Clone ID: 700952971H1
gtgttcttgatttgtactcatggaactttaatgccagcaatggtcctgtggagccttaccaaaatcatggtggaggtgggcctaataa

SEQ ID NO: 86208 - DNA, 258 bp, Glycine max
  Clone ID: 700952972H1
atcgatcacaaggaatcagaaaacccagaaatccacacacacaggctttagcaagccgtgtgtgaaggtgtgtctggtctgtgatcgttattaattccttcactagacctcctagttaaattaaccttttaataaatgtcacactcgctcaaggttttttttgttttcactctcttgttccttgctgtggttgaagctaaacacaaaaagaagcacaaacacaaaatccgccatggtcctaaaccatttcttcccctg

SEQ ID NO: 86209 - DNA, 88 bp, Glycine max
  Clone ID: 700952973H1
cactgggctatgaagtaaaagggcaagaagaaaaagtcttgaagttgaagaaggcgttgtacggtctcaagcaagcactgagaccttg

SEQ ID NO: 86210 - DNA, 88 bp, Glycine max
  Clone ID: 700952974H1
cctccgagttgtgctctacacgcacattaacaccgaacccacgcgctcaagtcttaaatctcgcgctcttaatacgtgtcagtccatt

SEQ ID NO: 86211 - DNA, 257 bp, Glycine max
  Clone ID: 700952975H1
tagaattaatggtgaagcaattcaaagcaatcgagatctttccatgatccttgatgctcttctgaaaacaaaatctagagcagtgctgaatgatataattaacaaaaatgatgttacataacattatgaagcagtacaggcatgacttcaaaaagattccaatactacgaaagcttcttaaggtcttggagttcctagaagcaggcaagattttgacatatgaacatattaatggtggtcctccttgtcgtggaatg

SEQ ID NO: 86212 - DNA, 254 bp, Glycine max
  Clone ID: 700952977H1
ctcactttcacatcatcccattattcctcttccttgtaagcacttcctagctcactatctatccttaattcttaatgatcttgtgcaatgcttttcatgacaaactgcaagtagttgcagtggcactttagtttgacaagatcacatatatatacactgcttgtggttcactgttgttatcacaatcaccagtgaatgggtttatcttctttgcacgtctgcatggattcatcagatcattggttgcagggcac

SEQ ID NO: 86213 - DNA, 101 bp, Glycine max
  Clone ID: 700952979H1
atcgtgaatgcgtataaaaggaaaataaagaaattagcggcaaaatgttgggtgtgttcagcagctccatagtgtcgccgccggacgagctcgtgcgcgcc

SEQ ID NO: 86214 - DNA, 239 bp, Glycine max
  Clone ID: 700952980H1
gttatcctcttttgcctccaaaggttgttatggatagatagatagatacaacgctgctttcagtttcctcaactcaagaatggctgccaacgactcgtccaccgagattggtactaagaagctttcgaattgttggggaaatgctcaaatgcccttgacactccccactctcctctcttcggggcgccagcacctcgacacatcattcagcactgccgctgacaattttttcagatttc

SEQ ID NO: 86215 - DNA, 262 bp, Glycine max
  Clone ID: 700952981H1
tgaagagcttgccactgacccaagaaccgcatcttatgtccaaaagatggccaatgacaatgaatatgtcaaccaacagttctcaagggccataattttgttatcggagacaaatcctttaacaggagatgaaggagaaatcagaaaggattgtcgctacctcaatgccaattagatatataatataagcttgcatttgtgcatgataatatgtataattagcgtaagattataatgcacgagtgtgtcaaaataaagaggg

SEQ ID NO: 86216 - DNA, 259 bp, Glycine max
  Clone ID: 700952982H1
aagaaagatcatgttgcttcttccataaaagccgtccaaaccctttgtcatcccacaaattatgagaaagaatgcgaggaaagcgctatagctggggctggaaataccacagatccaaaagaacttatcaaaattttcttcaacatcaccattacaaaaattggtgataaactcaaagaaactaatattttgcatgaggttgaggaggaacccagagccaagatggcacttgacacttgcaagcaactcatggatcttt

SEQ ID NO: 86217 - DNA, 94 bp, Glycine max
  Clone ID: 700952983H1
gcggaaaaacctgaatttctctctcttcggcacaaggtctaggtttttcactttcttcctccatgctcgttccgtcacaacccaaccatggaag

SEQ ID NO: 86218 - DNA, 258 bp, Glycine max
  Clone ID: 700952984H1
taaaggggtgttttgagaagatggagcagaaacagaaatcatgctagaaggagaaagggagggctcatcacaatgcccttcatctttggtaatgaggtttgtgagaagctggctgtggtaggtttcaacacaaacatgattagctacttgacaacacagcttcacatgccattgaccaaagcagctaacaccctcactaactttggtggaactgcaagcttgacaccgttgcttggtgctttcattgctgattcttat

SEQ ID NO: 86219 - DNA, 252 bp, Glycine max
  Clone ID: 700952985H1
ctctcacacactcaaccaaagacgaaggaagaagaagaattacaaagtaccaccaaacaggctgcgacgacgtcgttctttgcaacttccagttcttgttcttgatgaatatgacaccagtttgcccctttgtcaaagctgctcgccccgatgataacaatgcctctaagaaatctggcgaaaactctatgaaacatcaggctgagtctgagagtaaggtgaagaaagaggttaatgactcagctagtacct

SEQ ID NO: 86220 - DNA, 246 bp, Glycine max
  Clone ID: 700952986H1
caacttctttctttgttccgttctactttcccttcccaacaacaacaagaagatgccttctgcagaagcttcctccgaaaccatttgtgtcaccggcgctggtggcttcatcgccgcttggatggtcaaactcctcttggaaaaaggctacactgtccgaggaaccctcaggaatccagatgatcccaagaactggcacttgaacgagtttgaaggagcctccgggaggttgactctgcatagggt

SEQ ID NO: 86221 - DNA, 257 bp, Glycine max
  Clone ID: 700952987H1
acgagagacatagctggtgtgagattaagaatggttgtgttatggtcactgctcatgcagtattaggaaagaagttgttctgcatagagtggaagaaccaacggaagctagctatattcagtccagaggacaattcatggaaaatggtaccagttccattgacaggaagctcaagtattggtgttcgatttgggatactaggtggtaagttgttgctattccgtctggaatctgaaactgcttttcagacattgttg

SEQ ID NO: 86222 - DNA, 251 bp, Glycine max
  Clone ID: 700952988H1
ctcttctgccctctgcacctcccctcacacccttcctcattcgcaggaggtgaagatgtcgaccccggcaaggaagagactgatgagggattttaaaagattgcgacatgatcctcctgctggaatcagtggggctccccaagacaataatattatgctttggaatgctgttatctttggaccagatgacaccccttgggatggaggtacgtttaggttgacacttcagtttacagaggattatcctaata

SEQ ID NO: 86223 - DNA, 115 bp, Glycine max
  Clone ID: 700952989H1
tctcgagccgaatcggctcgagtgagcatagacccttcaccggagaatggctttccaagagtcttgcaaggtcaagaattctcgaccttgagaggcaattttgctgaaagtaatg

SEQ ID NO: 86224 - DNA, 256 bp, Glycine max
  Clone ID: 700952990H1
gcgttctgtgggtttgagaccttttgttggcttcactattctgatggtatcatttggcactacgagactcagtatgcacccatagagtacttcaaaaccaagatttccatgaagaacatatagtatgagatgctcagtagtacctctagctatacgttggagttgtaatgttatgtagcattacattagatgcagtgcgtaggtctgtaggtgcagaaagttattagggtaagaaaggaacaaaagtaaggtacgt

SEQ ID NO: 86225 - DNA, 255 bp, Glycine max
  Clone ID: 700952991H1
ctcatttatagtttactattgaaagatgggtttgaaaatggcaatactgatcctaggcctgctggccatgttccttttggtctcctcagaggtggcatccacgaattcaaaagaggtgacaaatggagttgaagatgccaaatatcctggtggaggctatggtgggggttacccaggcaatggcggtggtggctatcctggccgtggtggtggctaccctggtcgtggtggtggctatccaggtcgcggtggtgg

SEQ ID NO: 86226 - DNA, 102 bp, Glycine max
  Clone ID: 700952992H1
gcaaatcatccttggatgttcctttactaccgcagtggaatcaccatgaggagacagccaatatagcctctcatcattctaccagaaatgctactgtatccc

SEQ ID NO: 86227 - DNA, 256 bp, Glycine max
  Clone ID: 700952993H1
aaaatggcaagcaacaccaccatggtagacgagcgtgcaggggcggagatcgtgtatggcgcggaggaatgccaccgcagctccatggagctcctggaagagcttggattccccaaaggggtgatgccattgaaggaccttgtggagtgcggccgggttcgcgaaacggggttcatttggatgaagcagaaggagccaagccagcacttcttcgagcgcaaccaagaccctcgtgtactacgcggcggaggtcacc

SEQ ID NO: 86228 - DNA, 255 bp, Glycine max
  Clone ID: 700952994H1
gctttgtggaagtttgagacaacaaagtattattgcacagttattgatgcgcctggacatagggatttcattaagaatatgattactgggacatcccaagctgactgtgctgttcttatcattgattcgaccactggtggttttgaagctggtatttccaaggatggacagactcgtgaacatgctctgctttcattcacccttggtgtgaaacagatgatttgctgctgtaacaaaatggatgctactacaccc

SEQ ID NO: 86229 - DNA, 128 bp, Glycine max
  Clone ID: 700953001H1
ctcgtcttttcactccaccaaaatgctctcccaccgctcactttcctcatcggaattttgttgcaactcgaccatcattcatcgctggttccccactcttgattcggagaaatcatggaaggaaagct

SEQ ID NO: 86230 - DNA, 253 bp, Glycine max
  Clone ID: 700953002H1
tgatcttagaaaaatctatgttcttttgttttgaattcaatactcagtgctttgattgtgcattttgcatcagaagcaggcactgctgagtcacagtatggaggccaaaagctcaaaccagataaaagaggaaagcaatgattccaattatgataggaaagctgaaataaaagcatttgatgattcaaaaactggtgttaaaggtcttgtagattctggtgtgaaaaagatcccacgcatgttactttccggc

SEQ ID NO: 86231 - DNA, 253 bp, Glycine max
  Clone ID: 700953003H1
attggagatgacaatgagatgttgctagattccgaatccaatcgccgaaccctcaccgggcgacaacggtacattagctatggtgccctaaatgccaacaatgtgccatgtggtaaccgtggaagatcctactacaattgccagcagaggggtcgtgccaacccttacaatcgtggttgcaccaaaatcacacattgtgctagagacaccagctagatgaacaagtcatgaagctggagagggaatatatatg

SEQ ID NO: 86232 - DNA, 250 bp, Glycine max
  Clone ID: 700953004H1
gagcacagctgctggagatagggaaccagcttacaccagatgaggcaaggagttatgctatatctcaactcccacgcgaattgtcgaagcacaccggatttgcttttgattcacctggatacgaatccttctttgccgcacagctcggtgtatatgctgcacccattgcatgggatgtggcaagaagagctagcatgagatcacggtcaaagactgggcagcaaaaataatctggagtaggacattgtac

SEQ ID NO: 86233 - DNA, 254 bp, Glycine max
  Clone ID: 700953005H1
gttcggttccgatccgattggctcgtcttcagtgtgaaattcctcgctcatcgcgttccgaatcttcctctcttgttatccagcaaccggtttggcggcgcggcttttcacacgcgtctcacaattcgtccacgtttttgttttttttgttttttggataacgagaattctagatctcttgaacgcaccgtttttggcggttatagaggatcgggacgcgaggcggatgacggcgaggaggtttcggatgtggt

SEQ ID NO: 86234 - DNA, 251 bp, Glycine max
  Clone ID: 700953006H1
ggctgggcatatggacctgacattaaaagcctaagatggcctcctatttcttcacagttttcaacctaatcagcctctgatgttgtgcgtcgaaggcgatggattcgtacaagacaatctttgtctgagcaaggtacagaaagcttgcagggtggagcaagtactgtgcaacctggagcttctgctgttttatcatggagaagctcatcaaagaattctgaccaatgtttgcaagttcgacctaatttgat

SEQ ID NO: 86235 - DNA, 254 bp, Glycine max
  Clone ID: 700953007H1
agactgagaggaagagagagggagattctttgtttgctaccttctctcggaaaaatggttacgttcaggtttcaccagtaccaggtggttgggagggctcttcccacggaagcagatcagcaccccaagatctaccgaatgaagctctgggccaccaacgaggttcgcgccaagtccaagttctggtattttctgaggaaactgaaaaaggtgaagaagagcaatggccaagtgcttgccatcaagagattttt

SEQ ID NO: 86236 - DNA, 258 bp, Glycine max
  Clone ID: 700953009H1
gactggtctctgggcggtaaaatgaagaacacagaaagagaagaatctcttctctctcttggttgcttctctcctaacaatgggttccagagcaaggcttctccatggccaaactaccaccaccaccaccagggtaacaacaacaaagcctcttcttcatcatttcttcagtgccctaaggttgtggtagagttgcagaatggtggtgatggcaaagtattctctccctcttctgcaaatacagctgtgtcccagccc

SEQ ID NO: 86237 - DNA, 255 bp, Glycine max
  Clone ID: 700953010H1
gacaccaatgaaaaagtcacagcctctgctcatgatgcttttgtcggcagctggaagcctaccaagaatgacactatggagaatcgggttcctggatttggcactacaatgaacattctctatggggatggtgtttgtggacaaggtgatgtggactcaatgaacaatattgtttcccattacctgtattatcttgaccttcttggtgttggtcgagaacaggctgggccccatgacatccttacatgcgctgag

SEQ ID NO: 86238 - DNA, 199 bp, Glycine max
  Clone ID: 700953012H1
ctataggtctcgcccaatacctactctccgctcccaagagcacgcaccaccactattgcacttcttcctcgttctccctctttttcttcttcttcgctaaacccttttttctatctcactaacacaacaatgggagacgagaagaagggcaagcctgctgcttccggcgtgtggtccaccatcaagcctttcgtcaatg

SEQ ID NO: 86239 - DNA, 254 bp, Glycine max
  Clone ID: 700953013H1
gtgtggttgacagttaagaagtagcaaagatgtttccattcgggcacaagggtcaaaagataaaggggactatggtggttatgcagaagaatgtgttggatatcaacagcatcaccagtgttgacgggatcgtcggcaccggcttagacttcttaggcagtgcactcgatacagttacttttttagcctcctccatctccatccaacttattagtgctaccaaggctgatggtgggaaaggaaagttggaaagg

SEQ ID NO: 86240 - DNA, 200 bp, Glycine max
  Clone ID: 700953014H1
gagaatggctccatcgtggcactccacactccaataaagtcccacatccaagatggcttaccaccatcatgaccacaccaaccggaaatcccttttggacaccctatactgctccgatgcagaggaggactacggtcatttcctaaacaactcctcccctgcgtcccctcctttcttgctccaaagcgacatgttttcgg

SEQ ID NO: 86241 - DNA, 89 bp, Glycine max
  Clone ID: 700953016H1
ctctgttctctctccccctccccgattcgttttgcccctttcgttgccctaatttcaaccatgcctcgccgtagctccggtggaagatc

SEQ ID NO: 86242 - DNA, 251 bp, Glycine max
  Clone ID: 700953018H1
gtgattgaagaagagaatgatggggaattgaggttgtggtgaatgttggagttggagtaacccaataatggcattgagactgagactcaaagtgtcttcaattgggtcaccttttctgcagttaggttcttctgcaactgctgccttctcattctcccaaccatgctctcttcccaaacttgcttttcatccaccacgcttgcaactcaacaaaaattcacacccaataaggttccttgttcggctggtag

SEQ ID NO: 86243 - DNA, 255 bp, Glycine max
  Clone ID: 700953020H1
gagaacaaacttggttttaattggtataggcgtgccaaggtcttgttaattttgagcgttaagtgctgcaactaatcagatcccaagaccttggcctaccttgccatacagaaaaaaaaaaagcaaaaaaaaagccaaggtttggagccaacaaaaataaacacaaagcacaagtcatggaaagaataatggttggaagtgcaacaaaggttgctttcaccctcttggccactttcgccattgtcatccatgcct

SEQ ID NO: 86244 - DNA, 253 bp, Glycine max
  Clone ID: 700953021H1
cttatcttagcaatagctaccctatcacaacaatactctattaggcaaaaacaccaaatgggagaggaaaaagagcagcctaagaatgaaaccgagaagaagcccgaggaggccgccgcagcccccaagaaagacgacggacccatccctgtcgtttacaaactcgacttgcattgcgagggatgcgtcaagaagatcaaacgcacatgtcggcacttccaaggtgtggaaaccgttaaggcaatctatcgtc

SEQ ID NO: 86245 - DNA, 233 bp, Glycine max
  Clone ID: 700953022H1
tagacatcacttttattaaacctttcagttttgttgtagttcaaatactctgtttgtttagctaatacactgtatttacatacactatttgtgtttagttggtcttgccttgactactgatacttattagaaggcaaatataggagtcactcacttttgtgcctgattgtgcacatagttggttatcgtgtccaagtgcacgactagattagacatgctaacatttgctgagt

SEQ ID NO: 86246 - DNA, 238 bp, Glycine max
  Clone ID: 700953023H1
gatcgagataactagaaacagtgtgatgaaaatgaaggtccttgttttcttcgttgctacaattttggtagcatggcaatgccatgcgtacgatatgttccctctccgaatgaacactggctatggtgcccgtactccggaggtgacatgcgcaagttggaggcttgctgtggaagcacaccacatctttggctttgagaccattcctgcagagtgcgttgaagcaacaaaggaatac

SEQ ID NO: 86247 - DNA, 252 bp, Glycine max
  Clone ID: 700953024H1
cctcgaaggagagagaaattagagagagaaaggtgtgagtgtttgttttttagagagagaaagagtgtgagtgttgtgttgagtgcagtttctttctcacatggcctctatgccgttggggccgcagcaacagcttccaccgccgccgccgcaacaaccgccgccagcggagaatgacgcgatgaaagtggactctcgcggcggctccgacgcgagcaccgataaggaatgtcagcccctgtcgcagatggt

SEQ ID NO: 86248 - DNA, 130 bp, Glycine max
  Clone ID: 700953031H1
ggcatcttgtgttgtgtccctcttttaagctatttccttctcttaacacaattggttgtgccaattgccatagtcaccaaccaattaacacaggtatatatatcatcatatcatcaccaaatgacacata

SEQ ID NO: 86249 - DNA, 251 bp, Glycine max
  Clone ID: 700953033H1
gtttctcaatcgttagatctcatcttatactcaccggcgagtccatctcgcgccagctacgacgctgctccggccaccgctccggtcaccgcctttggttccctcactttctcgtccttcttcttctcagaaatatgccttctcagaaagttgaaacgggtcatcaagacacggtccatgatgttgcaatggattactatggtaagaggctggccacggcttcatcagatcacacaattaagtaattgggg

SEQ ID NO: 86250 - DNA, 250 bp, Glycine max
  Clone ID: 700953034H1
gtttctcaatcgttagatctcatcttatactcaccggcgagtccatctcgcgccagcgtcgacgccgctccggccaccgctccggccaccgcctttggttccctcactttctcgtccttcttcttctcagaaatatgccttctcagaaagttgaaacgggtcatcaagacacggtccatgatgttgcaatggattactatggtaagaggctggccacggcttcatcagatcacacaattagataattggg

SEQ ID NO: 86251 - DNA, 250 bp, Glycine max
  Clone ID: 700953035H1
cacgacttggagttggaatcctcttcttcccctctggtgttctcagtacggaggagtgaaccggagctggtggctccggccaagcccactccccgcgaaattaagatcctatctgagatagattctcaggcgggtcttcgtacccaaattccaatcatacagttctaccgtaacgacccatcattggcaggcaaggacccagttcaagccattcgaaacgctcttgcggaagcacttgtcttctactacc

SEQ ID NO: 86252 - DNA, 248 bp, Glycine max
  Clone ID: 700953036H1
ctcgagccgattcggctcgagggcatgcctttgagaaggctgtgctaaaaaggttgatgactgatgtgccctttggtgttttgctctctggaggtttggactcttcattggttgcagccgtcacggctcgctacctggcaggcacaaaagctgcgaacaactggggaactaaattacactctttctgtgtaggccttgagggtgcacccgacctaaaggctgcaaaggaagtagcaggtacataggaa

SEQ ID NO: 86253 - DNA, 249 bp, Glycine max
  Clone ID: 700953037H1
gggaaacaaaaccctcggacacttcctacctattcggacgagggaagttcatgacatcattcaatttttgttccataaatcaaaggcccaagagagcgtgaacctcaccgaagcgcttttgagtctttccaacaacgtaatatcgcagatgatgttgagcattaagagctccggtacagacagccaggcagagcaggcacggactttggttcgtgaagtgacgcagattttcggggagttaacgtgtcg

SEQ ID NO: 86254 - DNA, 124 bp, Glycine max
  Clone ID: 700953038H1
tcttgatccttcttttactccttgaactcaaacatggcagatgaggtgggtctgctagatttctggccaagtccatttgggatgagggtcaggattgcacttgctgaaaagggtatcaaatatg

SEQ ID NO: 86255 - DNA, 249 bp, Glycine max
  Clone ID: 700953039H1
gttgagaaaggaatacaagattaccaccacaaagcaatgggcggtatactttctgcgcttcttggcggcgacgcggcggcggcggcgtcttcgccggagagttctacttctagagtctcctccttccactcgtcgccgcgctggcagctctacttcaacgagatcaaagataccgataagctcgttgtgatagatttctcggcgtcgtggtgcggtccttgcaaattcatagagccacgattcacgcca

SEQ ID NO: 86256 - DNA, 243 bp, Glycine max
  Clone ID: 700953040H1
ctctctcccctgttcccccttctccttttctctatcaggtactctattgtaatgagcttttgtttgtgcaacatcattatcctttcctcaatcttgtagctgaggtgacattatatatttagctcagcatcactactggtttctcgaacctaagcagcgaaggagatgtgtggctgattcaattctaaagggaccagaaacaagcacatctgaatttcagttgttaatttaccatgtatacga

SEQ ID NO: 86257 - DNA, 247 bp, Glycine max
  Clone ID: 700953043H1
gggacggagtatcagggctccatttatgacgctggaccaacctttgagtcctatggagttccccatggctccgccgatttggttaaggctgttcctgatgatcacaagaaatttcttgctgatttggtttgggtccatgaagaggacgatgtctttgtgaacactgatgatggagttaaatgctgcaaattgattgctgttcatgctggtttggagaaaggaaaagatgtgaaagagcattaaaact

SEQ ID NO: 86258 - DNA, 167 bp, Glycine max
  Clone ID: 700953044H1
caaaacactgttacacacttgtcactgcctccatcaggtcgctgtcgcgctacctcgcacaaagcctcgataggccaaagcatattccaaacaaccatcaattggtgggacctccgttcctgcatgcttcttccccgtttctcctaccttctccgccaccctcctcc

SEQ ID NO: 86259 - DNA, 246 bp, Glycine max
  Clone ID: 700953046H1
cagaaacaaacccaccgggacaacctcctcctatcattacactaccgccatggtcgaaccaaagtcccgaaccgtgggcaacaccgagcgaactggtgccaagccgtccgcggtggcaccggcatcgccgtcctcgccctcctaacctcaaaaccccccgatatccccaagctccaaacctccctccgcaccctccaaacctcccacccaatcctcagttcccgactccaaaccaagcaaccacat

SEQ ID NO: 86260 - DNA, 245 bp, Glycine max
  Clone ID: 700953050H1
ctgaaactatgacttgtgaaaacccagaaaggaaaccttcggtgcgcgttggtagatagatagagagagattattgttgttgggatattctgagaaccgttgattgagaaatgaacggtggtgatgaggtcgtggcagctccggcgagtccaccgcagccgctggagtggaaattctcgcaggttttcggggaacgtacggcgggggaggaagttcaggaagtggatataattctgctattgaat

SEQ ID NO: 86261 - DNA, 244 bp, Glycine max
  Clone ID: 700953051H1
gctgaattcagctatggagatgctgtggtcactaagaatactcttgtaagtgatcatcagtcacaacaacgtctaatgattacagagcccaaacaggttcgtggaagggctgattctagacatggtcaagcgaagagaatttagttcatggagatgctatggtcactaaaaatcccattggaagtgatcaatgtctcaggattacagagctgaaacgggttcttggaaattctgattctagaaa

SEQ ID NO: 86262 - DNA, 243 bp, Glycine max
  Clone ID: 700953052H1
cgaagatgctttgggattgtttcgtagcatgggagagtgggggtgttaccctaatgagactacttttcttgttttgattaggagtctgtatcaggctgctaggttggaagagggggatgagatgattgataggatgaggtctgctgggtttggtgagtttctagataagaaggcttactatcagctcctcaagattttgtgtggcattgagagggttgatcatgctttgagtgttctgctatg

SEQ ID NO: 86263 - DNA, 249 bp, Glycine max
  Clone ID: 700953053H1
atgggaaccagtcttgtccacagtgcaagactagatacaagaggcacagagggagtcctcgagtggagggtgatgaagatgaagatgactctgatgatatccagaatgagttcaattatgcccaaggaaaagccaaggctaggcgccagtgggaagatgacgctgacctggcgtcgtcttctagacgcgaatctcaacagccaattcccctcctcaggaatggccagacgatgtctggtgagattccgg

SEQ ID NO: 86264 - DNA, 245 bp, Glycine max
  Clone ID: 700953054H1
gctgaaggaactacctcaactgttagatgcagaaatattacccttgattgttacaatttctggaagagttagctctgaaaccccaattaactgcgagttcagtggtttaagaggtgtaatagttgaagaaacagcagagcaacattttcttaaacacaatgatgctggttcctggatacaagattccgctttgatgctatcaatgagtaaagaggttccttggtatctggatgatggactgatcg

SEQ ID NO: 86265 - DNA, 247 bp, Glycine max
  Clone ID: 700953055H1
ggatatttggattggttttctttcaccggcggcgaaggtaaggtggtgcaaacaaacaaaaaaccctaattctcgaatatcagatcggcgatcggaggaagaatctgaagttgggcgaagatggttctcgcggagttaggagggagcatttcgcgtgctcttcagcagatgagcaatgcgacgatcatcgacgagaaagtcctcaacgattggcctcaaggacatcacgcgcgcgctctccaatccg

SEQ ID NO: 86266 - DNA, 242 bp, Glycine max
  Clone ID: 700953056H1
cctcattaaccgggatgtcaaatctgctctggcagtgattgatgatatgagagctgctggatatgaaccatcaaaagagatgctaaaaaaggtcagacggcgatgcacacgagaaatggacaatgaaagtgatgccagagtgcaatcactggctaattccttgaattaccaattgggttcagaaaaccgacgggacattctgtttaatcttaattacagtatgggttatgcttgaatgaata

SEQ ID NO: 86267 - DNA, 253 bp, Glycine max
  Clone ID: 700953057H1
gtaactcggcattcggttcgacgctgcttatgctcttgtgtcactgtcatcatacgctttgccactggtattctgttaggaatggctagtcgcgtcgtcaacactttgtggacaagcactacggtgcaaaagaatatgacatgatgggagtgtatcttcagagatcatggatagttttattcttaactgcaatctgtcttcttcccctgttgatcttcagaagcccaattttgactatcttaggccaagatgg

SEQ ID NO: 86268 - DNA, 152 bp, Glycine max
  Clone ID: 700953059H1
acgtacaggtagcctaagcgaccttcgtcattacaaagacttgaattaaacttcctaaggcttatcccgaatgccaagacccagcaacatgtcctcgtggcccaaagtttgaaccaccagggctactcttctggttactctgttggtaatac

SEQ ID NO: 86269 - DNA, 250 bp, Glycine max
  Clone ID: 700953064H1
gaaagttgaagctttttttgttgaggtgaaagtgaaatggttggcaaggataatctgagggctgaggacttgaacttgtgctttaagaagcttatgatggtggccgggagtgggaacagtgagaaaggggtgaacttgaaggttggggtgatcaccgagtggaaggatattcctgtggagcttctgatgcaaattctgtcccttgtggatgatcagacggtgatcatagcttctggagttttcgtggatg

SEQ ID NO: 86270 - DNA, 246 bp, Glycine max
  Clone ID: 700953066H1
ctttttcgtttactacgaggaaggaaaataacaataacagaggaagaaagaaaattacacagtttcaatttcagtatcagctacactttttagaaatggctactctatcaagcttcatcgctacgccgaagaatcccaatacccactttctctcaggttcctcattgacgatggacaaatgcttcttgaaaatcagctccagtgaacactttccaggttcctctttaaagactaagcaacacgtaa

SEQ ID NO: 86271 - DNA, 244 bp, Glycine max
  Clone ID: 700953067H1
caaaaccagacggttatctagtcttccaatcttccccctattccctgttcctattcctattttatcaatcaataacataaataacacttcttcttgccttttaatatatttttctctcttcccctcttgtttcacctttcaacacttaattagagacgacccactttccttgcagatctttttccagggaaaagtttggatgttttgtggtaagagttagatgttgagtgatagcggaaaggtt

SEQ ID NO: 86272 - DNA, 245 bp, Glycine max
  Clone ID: 700953069H1
cgaaacttttagggcagatgctttactatgttctcactactggctcgggacagcaaaccctgggagaggagtactgcgacatcactcaggttgcaggaccttatggacttcctcctacccctgcgaggcgtgctcttttcgttgtatatcagactgctattccttatattgcagaacgaattagttctagaattgcttcgcgaggcattgtccttgctgactatgagtctgctggggttttggtg

SEQ ID NO: 86273 - DNA, 245 bp, Glycine max
  Clone ID: 700953070H1
cacaaacactcaactctctctttctttcttcctgctgctacaatatggagcctctctcttccaccaaacacaacaacaatctctccaagccttcctccctccacacggaggctccgccgccggagccagtcccctccggaagatcatggtggtggcctccatcgccgccggggtgcaattcgggtgggccctacagctctctctacttaccccttacgtccaactgctggggatccccacacttg

SEQ ID NO: 86274 - DNA, 241 bp, Glycine max
  Clone ID: 700953071H1
cttggttgcataacttctgtagaagctggcatcaataacaaggtgaaccttttgagaacaatgctctcttgggaagagcaattgcgctctgaagtaagtttcatgcaagcaaagcatgatgcaaagctttatgatcttcatggttctcttggggaagtggtaattatatgttggcctcatggtgaaattttgaggttaaaggcgggtagcactgctactgatgctgctcaaagattggttt

SEQ ID NO: 86275 - DNA, 245 bp, Glycine max
  Clone ID: 700953072H1
aacactcataacacaaagcacaaagcaaagctcatccttgagttaaaaaatggcagcagcttcttccatggctctctcatccccatccttggctggcaaggccgtgaagctgggcccatcagccccagaagtgggaagggtgagcatgaggaagaccgtcaccaagcaggtctcctcaggaagcccatggtacgggccagaccgagtcgagtacttgggcccattctctggcgagccccgtccta

SEQ ID NO: 86276 - DNA, 246 bp, Glycine max
  Clone ID: 700953073H1
aataacggttttcgggttgggttggagttcgggaagaacaaggttttggagatgatttttacgaggagtggtgatgtttcggttgtcggtatttgcgggattggtgggtccgggaaaaccactcttgctagagaggtctgcagagatgaccaagtgagatgttatttcaaggagaggatcttgtttttgactgtgtcgcagtccccgaatgtggagcagctgagagagagtatctgggtacacatc

SEQ ID NO: 86277 - DNA, 206 bp, Glycine max
  Clone ID: 700953074H1
ggatgtcggctttgaaagtacaaactttgatactactcatgttagaaagaacatcgggatttggaagggagatgctgatgagttaaacccatgttgggctaagccatctgaagacaatgcggagactgaggggttttttaccttttcactaaccaatggcccagagtaccatatatctcagatagcagatgcagtgcttgttgctc

SEQ ID NO: 86278 - DNA, 248 bp, Glycine max
  Clone ID: 700953076H1
ctacgcctctcctctctctcaaaaatcgttctcttcgattttagcgttttgttttgctgctgcctccgttccccccttctcataaacaacgcgttttctcttctgcttcgtatctattctttgctctttggttttggttgattcaaggccttcacagcattcgttgcggcattttaatcgatttatccaagcaggactgaatgaactaatggagtctaaaggtgggaaaaagaagtctagtagtagta

SEQ ID NO: 86279 - DNA, 141 bp, Glycine max
  Clone ID: 700953077H1
gttttggttttggagttgggtttataatcttcaatcttgtttgggagagagagagagagatagagatgtacatagcttccatgggaatgtctttcaaggactccttgaaactgcttgaagctgatattcaccatgccaata

SEQ ID NO: 86280 - DNA, 240 bp, Glycine max
  Clone ID: 700953078H1
attttctttcaacaaacgcagtttctctctctctctctcgtagttcaattcaattcaattcaatatgatgcagagactctcttctgccactactactactactactcgctctgccttgctgcgctacggtggcggcgcacttcgccgggacgtgcttgctcccatttcctcttctcacttagcagctaagtcacaggcgggtgaaaatgacaccaaagcagctagatggttttcattatg

SEQ ID NO: 86281 - DNA, 129 bp, Glycine max
  Clone ID: 700953079H1
aaagaaaaccacacaccacacattgacaaataaacgtgcaaacttatgtgtgcataattttcttatgtatgcttaagttttgtaattggatgctatctagtttttcatatctaatagggtgttgtgtca

SEQ ID NO: 86282 - DNA, 257 bp, Glycine max
  Clone ID: 700952429H1
gaggaagtggtgtatgaaactgaaaagaattttgctgatgagaagcctgcaggcgaggaagatgcacctgaaggtgtgactttgtgacatttttgtctttaattactttgtattaagctccatgaataaccaatttcttctcctaacgtgtgaaaaaaacctgcctccaatatttataatttgtaaggttattagttgcttctattctaaccttttaccattttggtggcctaacaaacagaaatttaatttagtaa

SEQ ID NO: 86283 - DNA, 251 bp, Glycine max
  Clone ID: 700952430H1
tgcacgacacagacggcaactaacctgcacgcgccgtcgtcgtcgctatgacccaaccccaagatcccttctcttaccctcccattgacccagtcaacttcgatctcatcatcgtcggcaccgccctatcggaatccgtcatcgccgctgccgcctccgccgtcggcaaaaccatcctccacctcgaccccaactccttctacggaagcaatcggttctctctccctccagaacttcacttcctacctctt

SEQ ID NO: 86284 - DNA, 258 bp, Glycine max
  Clone ID: 700952431H1
caaagatttcatcatgtggaaattccaggctcaaaggaacctcaattatggaatgatgtctggaagttctttgagaaagcatctgttcttgaatttgatgatagtaaaatgcagaagacttatgagacaatttcattcaaggaagtccatgatgaaattgttgagctcaagggattgtgtgatctactcaaatctcctgtaatttttgctcacaatgacttgctttctagaaatataatgatgaattgtgaagaagaa

SEQ ID NO: 86285 - DNA, 264 bp, Glycine max
  Clone ID: 700952433H1
attcaaaagcagcacgttggttctcaccatctaagttttttcatggaactgattggattgaggttactggaattccttactttcctggcgtgccgaaacaccataggcacaaaaagacaatacttaattggcaataaaagtaatgagttgcgaaagcagccatattaattaattaaaaagtaatgattgtgcttctttattctttaattatttttatttcattacttaactttagagttagctacatttttttatctcaaggaa

SEQ ID NO: 86286 - DNA, 258 bp, Glycine max
  Clone ID: 700952434H1
gaagaagagaacgattctgaacccatcactcgttcctccatcaaccccttcgacctcctcaacgacaacgattctgagcccgaagaccagggagatgagttgatgtccaccaatgaaaggttggcgagttatgatgatgaagaggagtcatcttcattgaaacctactgctgaggtttctacatcaaacccaaaatcgaagaagaagaaaaagaagaagaacaaggatagtgctgttgcgaataaaacgggagaagat

SEQ ID NO: 86287 - DNA, 258 bp, Glycine max
  Clone ID: 700952435H1
acgctctctctctccttctcgctctttcagctttgacttttgttggaaactaaggcctaatcaaaatggtgaagttcacagctgaagagctacgtcgtattatggactataagcataatatccgtaatatgtctgtcattgctcatgttgatcacggaaaatcaaccctcactgattctcttgtggctgctgctggtattattgctcaagaagttgccggtgatgtccgtatgactgatacccgtgcagatgaagctg

SEQ ID NO: 86288 - DNA, 255 bp, Glycine max
  Clone ID: 700952436H1
acttgccacaccaccgccgccgcaggagacaacaacaacaacaacacgttccattctcgaggagagagtggttgggttcgatggagaaggagttggtggaattgtacgaagcggcgaagaaggcggcggatgctgccatctccggcgacggcaaacatgaggaaagccgatgcatcgatgcgctcgagcagctcaagaagtttcccgttaattagaagatcctcgtcaacacccaggtgggtaaacatcttaaag

SEQ ID NO: 86289 - DNA, 113 bp, Glycine max
  Clone ID: 700952437H1
ggcttcgaagttgccaccaggattcgaaagtttagaagtggaaaccggcctatgacagtcgccttcgactgcaactgcagacgaacatttgtgggacagatgcatgcaagttg

SEQ ID NO: 86290 - DNA, 257 bp, Glycine max
  Clone ID: 700952438H1
gtgtgagcattcacatttgacggaaacagggtagcgtgagagtcgagtcacctgccgaaatcctatagcaccattttgaccaaggcgatatagctaacagctattcgcccccccatactttctttaattttctccttctcccatggtgtaattgctccaactatggccgtggacctcatgacgaccggttacacccgaaacgacaacatcagtagtttcacaaccaaagccgaggaaaatgccgtccaagaagccgc

SEQ ID NO: 86291 - DNA, 258 bp, Glycine max
  Clone ID: 700952439H1
aaagagaatccgaggcgaagagaagagaaaaattaagatggaggggaaggagcaggatgtgtcgctgggagcgaacaagttcccggagagccagccgattgggacggcggcgcagagccaagacgacggcaaggactaccaggagccggcgccggcgccactggttgacccgacggagtttacgtcatggtccttttacagagcagggatagcagagtttgtggccacttttctgtttctatacatcactgtcttaac

SEQ ID NO: 86292 - DNA, 151 bp, Glycine max
  Clone ID: 700952440H1
ggagagagataaagagagaggtagagaaaagcgaagagtctctctcttcctatctctctctttcaatgtcagggcacaaatcttccacctctacttcttcttcttcttccttctaacctatatcagaaggaaacgcgaaaaaagaccaaaa

SEQ ID NO: 86293 - DNA, 258 bp, Glycine max
  Clone ID: 700952441H1
ccactccatggtcaaaaactgctgagaactttggcaactctactggtgaacaaggctaccctggaggaaaattctttgaccctttgggatttgctggagctatcaaggatggcgtttacattccggatgccgacaagctagagagactgaaattggctgagattaagcatgctaggattgctatgttggctatgctgattttctactttgaggctggccagggcaagacaccccttggtgctcttggcttgtaagcaa

SEQ ID NO: 86294 - DNA, 244 bp, Glycine max
  Clone ID: 700952442H1
ctgtaagggaggctaaaaatgaaacttcttacggcggtcgtggtggtggccgaggaggtggaagaggatttggacgcggccgtggtggcggcggtggctttggccgtgatttttccaatgatgataactcatcggcccctgctaaccaaggatcttttgaaggagattctgggaatccctcagaaagacgcggttatggtggaccccgtgggcctaccttggtgcggcaatggcgtggtctcgt

SEQ ID NO: 86295 - DNA, 245 bp, Glycine max
  Clone ID: 700952443H1
caccgattcacctatgaggtacgtggacattggaattcctgccaacaacaagggcaaacacagcattggttgtctcttctggctccttgcaaggatggtgttgcagatgaggggtaccattcgccctggcctcaaatgggatgtcatggttgatctgttcttctatagagaaccagaggaggctaaacaaacaagaggaggaggaagctccggcggttgattatgccatcacggatttcaatgca

SEQ ID NO: 86296 - DNA, 257 bp, Glycine max
  Clone ID: 700952444H1
gaatggtctatttttttattatggattctcaacaccatatcatctctcctttcgccggtacatcctctctgccgtgcgcctccggcagaggcgatttccgacggctgtgccgccacttttatttttcctccctccacaattttttttctacgatcccctatttctcctccttccttgacttgatttttcaattccaatcaaacaaacgcaattgccattgttcccaatgatctctcagaccatagtggctttggctc

SEQ ID NO: 86297 - DNA, 256 bp, Glycine max
  Clone ID: 700952445H1
ctgaaagtaacgatcctcatcagcggttttagaggggcgtggttcacaacgtatccacactgctgaggttttgaattttaaaactcagtgtcactttgtcgtccacgtggcagtcaccgacgcgcattcttcctttcccctttgtttctctcttactcctttgagtggccgtccaatttcctcagaaccttccccatgctctgctcggcccagaccggaaaatccggtctgaactggctcgaccgcctccggtcca

SEQ ID NO: 86298 - DNA, 148 bp, Glycine max
  Clone ID: 700952446H1
ggttcgtgcagatccccgtgggagtagcggggccattattgttggatggaaaagaattcaccgtgcccatggccaccactgaagggtgtctggttgcgagcaccaacagaggttgcaaagctatatacgtctccggtggggcctcctc

SEQ ID NO: 86299 - DNA, 214 bp, Glycine max
  Clone ID: 700952447H1
ttcaagttcaagttcaattcccacaccaaggaaactctctcatctctcaaacccaacaaaaaaaaaccattactttacttcactttacatgtcgaactccgacgccaccactaacggcgtcagtaacggcgccatcattgatgcgcagagacagcaggccttagccgttaagaagccgccgtctaaggaccgtcacagcaagtggacggccagg

SEQ ID NO: 86300 - DNA, 248 bp, Glycine max
  Clone ID: 700952449H1
ggttttgatttgcctggccaccaattgggggcggtagatcaaaatcaagttctttcatttttacacttttgagtttttccaacctgaaatctctctcttctggggttggatgctcgttccaaaacatccaatccagaaccacaataactttcaaaactttttcttcctgtgttgccttcaacgttagttctaattcatttacaacaccaagaatacatcatttgattgattcaaacattgtcctggag

SEQ ID NO: 86301 - DNA, 239 bp, Glycine max
  Clone ID: 700952452H1
cgcaacaaaaagaaagaatcccaggcgaggagaaagatggaggggaaggagcaggatgtgtcgttgggagcgaacaagttccccgagagacagccgattgggacggcggcgcagagccaagacgacggcaaggactaccaggagccggcgcccgcgcccgctggttgacccgacggagtttacgtcatggtcgttttacagagcagggatagcagagtttgtggcgactttccggttct

SEQ ID NO: 86302 - DNA, 253 bp, Glycine max
  Clone ID: 700952453H1
ctccttgtcagggaagatctgaagcagcgctagtagtcacgtcctgtaatggacgcatactcctccggcgaagaagtggttgttaaggttagacttattgtggtggtatatggggaaagtttctcgtgaaagggagttagtaaagttttgtactgttgtctgatgattagttaagtggctttttgcagacgagaaaaccatatacaatcactacgcaaagggaacggttgacagaagaggagcataataagtt

SEQ ID NO: 86303 - DNA, 257 bp, Glycine max
  Clone ID: 700952454H1
gtcatagaccacaaatctctccgctagtggatcgtgatgtggtgcagccatctttagatacatcaaatggtgtcttagatgattcagaagatgtaacagtcaccaaaagttgccttgttttgaatgtgcctgggtcatctaatgaacctgaacaaggtgagaaaacttgttcagccatggaaaacgctgagcatgttatagatatttccaactcggttgtgggaaattctctagactcaattacgaagtgtgatgat

SEQ ID NO: 86304 - DNA, 256 bp, Glycine max
  Clone ID: 700952455H1
gtggttatagttctcatatggacacttgttacgtctcctttgcttgtattgggagggattgctgggaagaatagcaaggctgaatttcaagctcctgttcggacaactaaatatccaagggagattccacctctgccttggtatcgtggaacaattcctcagatggcgatggcaggatttttggctatcagtgctatatacattgaactttactatatatttgccagtgtttgggagcacagaatttacaccatct

SEQ ID NO: 86305 - DNA, 257 bp, Glycine max
  Clone ID: 700952456H1
aacgtttcgaaattcatttttttttactagcatacttaaagagagagagagagagagagagagaggggagggttgcaaattccatgagagcagaagaggtgcctcttactcgtctcgtctttcaccgttacgagtgagttcgacccctcctcttgctcttccttctcttctcttctcttctcttctcatatcaaagcaataaccctagaacatggaagagagcttcgtttcccagtggagcgtcatcagatctctct

SEQ ID NO: 86306 - DNA, 254 bp, Glycine max
  Clone ID: 700952457H1
atcgctgtggttatcatcttcttcttcctctttcttagatctcttctttctctacgccgcacgccgaaaccatggccggaaaaggagagggtcctgctatcggaatcgatctcggaaccacctactcttgcgtcggtgtgtggcaacatgaccgcgttgaaatcatcgccaacgaccaagggaacagaaccacgccgtcttacgtcggattcactgacaccgagcgtctcatcggtgatgcggccaagaatcaa

SEQ ID NO: 86307 - DNA, 253 bp, Glycine max
  Clone ID: 700952458H1
gtaaacataggatccacgatcaactcgattttatacttttgtttctatttctctggaggcagctagctagggtcatactcatggggagcttgaaaggagacagtggacatgccaatggcgaaaatcttaccgaagctcttttgccaacacgagatgcacaacaacaacatcaaacagacgacgaggaacaaagatttggtgacaagctctggcttgaaacaagaagttatggctcaatgtgggggcctctata

SEQ ID NO: 86308 - DNA, 256 bp, Glycine max
  Clone ID: 700952460H1
atttactctctccactctctttgtgtctcccaaggtgctgtgttgtgttgcttggtgcaattaaagctttctactttctacctcaaatctctatagcctaatattctacccgctgaggtgagtcttatattttattttatctccaagggaacctgctagtagtctcatttccattgaatatgaattcctaccaatttttttcttatccttttctctgtggtttttccctatgaaaaaagtgattactaaactattc

SEQ ID NO: 86309 - DNA, 120 bp, Glycine max
  Clone ID: 700952461H1
caccattcaagctgatgaaaaaaaaaaaaagctgattacggaaaactctactaattctaataagtcaggttccacgacagattattacccctgaacgcagatatggtgcgcaagttgcaa

SEQ ID NO: 86310 - DNA, 255 bp, Glycine max
  Clone ID: 700952462H1
aaacagttctccaccgtgttgtttcaccagttatagcaccgtgaagttcatgagcatgaacatattggactgcacgcactataccagtgtgtttaacacggataatttgaagggtgttggccctttggactgggtttatgggatcaagctttctttcagtgtgcctgatactggatgtcaaagttgcaaagaatctggtgggacatgtggctttgatactgatacggaaggtttgctttgtctttgctcaagttc

SEQ ID NO: 86311 - DNA, 253 bp, Glycine max
  Clone ID: 700952463H1
atctaattggtatagaatagtgttttagaaagagtgtctagcattttgaataaatatgtgatccaagtccatgaataggccagattgttatggggtggttggattcagtgtggggaagaggacgaaagtttattaaaaggaaagacagtgatgctgccgatccaggtaaacccctggaggaccccagagctcctctctacaatgacatccgaacatcagaaggagccaagcgccaacagcaaagatattgtgg

SEQ ID NO: 86312 - DNA, 259 bp, Glycine max
  Clone ID: 700952465H1
ccgccgtgtctttattatggacaactgtgaggagttgattcctgagtatttgggctttgtcaagggtattgttgattctgaagatctcccactcaacatttcaagagaaatgttgcaacagaacaagatcttgaaggtcatccgtaagaacttggtcaagaagtgccttgagctcttctttgaaattgcagagaacaaggaggattacaacaagttctatgaggctttctctaagaacttaaagcttggtatccatgag

SEQ ID NO: 86313 - DNA, 126 bp, Glycine max
  Clone ID: 700952467H1
atatagcccaagccctatacaaccaaaccctaacacacacccatttgattcagtttccatggctagcctcaaggttgcatttttggctgcagtgctctgcatggttgtggtgagtgaacccaggga

SEQ ID NO: 86314 - DNA, 150 bp, Glycine max
  Clone ID: 700952468H1
ctagcagcagcaatttgtttcgtgagcacttgcagcttcggtttcttcactcttcttcgctagggtttttgaagttgacgatggcttcgcctcctcatttcgacgaagactttgattttggaggcggttttagcggaacgcattcagata

SEQ ID NO: 86315 - DNA, 256 bp, Glycine max
  Clone ID: 700952469H1
taattatcaaacctaaccagtaaaaatggtgaccgtggaggaaatccgcaacgctcagcgttcccatggacccgccaccatcttggccttcggcaccgccacgccgtccaactgcgtctcccaagccgattaccctgactactacttccgcattaccaacagcgaacacatgactgatctcaaagaaaagttcaagcgcatgtgtgaaaagtccatgataaagaagcgatacatgcacctgacggaggagtttctg

SEQ ID NO: 86316 - DNA, 253 bp, Glycine max
  Clone ID: 700952470H1
taacgatttctattgtgctgagtttgacggtgaatcagaggcaggcgtacgtatacgtgtagtagggtgattgagagatggacgctcccctgctgctggtgaacggcgacggggcggcgctggtggcggagaatggtgactacgtggcggtgaaggagctgaaggaggtgaagaaggtgttttggattgagaccaagagagtgtgggagattgcgatgcccatcgttttcaacatatggtgtcagttcggtgt

SEQ ID NO: 86317 - DNA, 247 bp, Glycine max
  Clone ID: 700952471H1
ctcttcctcaccgattgctagaatggaatttcgatgctcagtcatctcttttaccattctcttctctcttgctcttgcaggagagagccatgtccatgcatcgctacctgaggaagattattgggaagctgtttggccaaacactcccattcccactgcactgcgagagcttctaaagcctctccctgcaggtgttgaaatcgacgaactccctaagcaaattgatgatacacagtacccaaaaaca

SEQ ID NO: 86318 - DNA, 252 bp, Glycine max
  Clone ID: 700952472H1
tagggttctcctgaatccgcaatggccgtttcaaccactttctccggtgccaaattggaggctctattgctcaaatgttcttcctcctcttcctcaccaccgccttcaaggtcatcattcaccacttttcccggccaaaacagaagaaccctcattcagagaggggttattcgctgcgacgctcagccctctgatgcatcatctgttgctccaaataatgccaccgctctctccgctcttgagcagctcaag

SEQ ID NO: 86319 - DNA, 236 bp, Glycine max
  Clone ID: 700952473H1
ctcgtgaaaagggaccatggaggcaaattcaggtgccagcgaccgaatttcgagaatcgccggccacctccgcccccagagagaggatgatgtttgtttgaagcgtacgcttgccgtgcaaaaggtggggtctccggattcaaggtggccatattgggtgccgcagacgcatagggcaacctctggcgatgttgatgcagatgaatccactcgtatcacttctccacctctacgat

SEQ ID NO: 86320 - DNA, 244 bp, Glycine max
  Clone ID: 700952474H1
tctcgagccgattcggctcgaggcattttccaccactgatggattacctctggatgtctttactgttgagggatggcctaatcgaggaaactgaggagctgaaaggtgtgttggaaaaggaaattttcaaggttaaggagcaaaatttgtcaaatcagggttaaacattatgctaccaacgaacaataccaggcaaggatggaaccctcgcctcattgcattcaaataccatctgatggagctg

SEQ ID NO: 86321 - DNA, 70 bp, Glycine max
  Clone ID: 700952475H1
caattctgattgcaataacaaccgtaccacgccttccagccataggcggtattaggcttgagcgatatca

SEQ ID NO: 86322 - DNA, 247 bp, Glycine max
  Clone ID: 700952477H1
tgaagcttagacatgatattccacgacacgaagtcaaacaggtgatttgttcactttgtgggactgaacaagaggttcagcaaaactgtataaattgtggtgtttgtatgggaaaatacttctgtggaacatgcaagctttttgatgatgatatatctaagcagcagtaccattgctgtggctgtggaatttcagaactggaggaagcgaaaatttcttccattgccaacaagtgtggttgttgcta

SEQ ID NO: 86323 - DNA, 252 bp, Glycine max
  Clone ID: 700952478H1
caccaacacgtgtggaaaatggtactcctgggaagcaatacatgatcaaacatgatgccaatggaaatacacacgtttctgatctcacagtagtggatgttcagagtgtaaaagaggttgcatttcttttaaatcaagctgcaagtagcagatctgtgggaaaaactcagatgaatgaacaatcttctagaagtcattttgtattcactcttcgaatatatggtgtaaatgagggcattgcccaccaggtac

SEQ ID NO: 86324 - DNA, 254 bp, Glycine max
  Clone ID: 700952480H1
tgatgatggcctatgagttccatcaggacaaatccatggtggcatgctctttcaattctcaattgaaattcccccaaagccaccttcttttgattcaataaatcaacacccaattttcaaaattccaacttgtaatcaatttttctttccatttgacacaccataccaatcaaccaaccttgttgcttcttgtgatcactcctgaaccacactaatggatattgatgagtgggagtttctctctgatgatggct

SEQ ID NO: 86325 - DNA, 248 bp, Glycine max
  Clone ID: 700952482H1
caacagttctgtatcctacccttggagggaacatacatacttttagggcaataactccctgtgcaatctttgatgtgttgtctccaccttattcctcagaacatggaagacactgcacttacttccggaaatcgcagaggaaggatcttccaggtaatcttcagttgaatggagttacagtttctgatgtgacctggtgggaggatttccaacttcccgatgtttgtgtgatccgtagagggatttac

SEQ ID NO: 86326 - DNA, 143 bp, Glycine max
  Clone ID: 700952483H1
actaggtgaacaacatatactctgtgcttctcatgatgatagtgtagctgaagctgcttctgctgcagcattggtgatttggacacaaaaaaagtttcaggcttttcggtcctctgagcttctggtttgtcattttgaaggag

SEQ ID NO: 86327 - DNA, 199 bp, Glycine max
  Clone ID: 700952484H1
ctcgttgaaatgaaaatgggttcttctttgtggactttgtgtctaattttggcttcactagcctcttctgcattctgtgcctttccacggaggccagtggatgttccattcggcagaaactacgttcccacttgggcttttgatcacatcaaatacttcaatggaggttctgagattcaacttcatcttgacaagtaca

SEQ ID NO: 86328 - DNA, 254 bp, Glycine max
  Clone ID: 700952485H1
tttcaacaatgcactggcttacaaccctaagggtcacgatgtgtacaccgtggcagagctgcttctgacgaggtttgaggagctgtatcggccgttgcatgagaaattcgaaggtagcgtaggtcatgatcgcgaatctgaggaggaattgcaagccagttcgtggagccacgttgagccagagagggtgaagaaaaaggagaatccgataccacctcctcctcctcctccggagaaattgcaacaagagcctc

SEQ ID NO: 86329 - DNA, 254 bp, Glycine max
  Clone ID: 700952486H1
gagcgttatgggttgccatctcacacaccctctcctatatattgtagcattttcctggcatagtctctaagatcatccatccatctactcataagctttacttaattagcaaatccaaatatggcactttcttcttcatcatcttcaacatccatatttgctttagctttgttcactcttttgcttataggaagttcttcagctcaactctctgagaacttctatgatagtaaatgtcccaaggttttctatgc

SEQ ID NO: 86330 - DNA, 251 bp, Glycine max
  Clone ID: 700952487H1
gaaaacattcttgtggggtaggtactctttggaaatgtctgctgttatttacaaggattgggttttcaccgatcaagcattgcctaatgatcttgtcaagagaggagttgctgttaaggatccatctgctccccatggagttcgacttttgatcgaggactatccttatgcttctgatgggctagagatatgggatgctatcaagtcttgggtggaagaatatgtctcattctactacaagtcagatgagg

SEQ ID NO: 86331 - DNA, 233 bp, Glycine max
  Clone ID: 700952490H1
caacacccaagaattgtgctttagctataataaaaaaaattaagaatgatttaattataaattaagatgtgatctaaggggagataagaccatgtgaggggtcctctctgattttgctccaaaaccttccccttcttctgatttgtagagactaacccaagaaagaaccaaccaaaaacaagtgcttcttagagcttggaactctaggcataattgggattgatctaactata

SEQ ID NO: 86332 - DNA, 253 bp, Glycine max
  Clone ID: 700952491H1
gtggcaatcaattggaagcggtatcattcttgcacgtatccgctgcatatatggattgtggtcgactacaccactgtgtttgttttccgggtattgatgtttgttgataacgggctttctgcaggaatgggtttgtaaggcctcccatccatgttttaatataaatattttggttttcttcaatttacattggttgtatgcactaatttaattgaaattagagtatgatggataaggtttggtgtttcaccat

SEQ ID NO: 86333 - DNA, 251 bp, Glycine max
  Clone ID: 700952493H1
caagcttggttctagtagttttagtagctctcacagttcaaattttctacatttcacccatagatccagttttgctggatataaaacctgctccttcaaccaaagacaatcaattacagaatatcattaagcttggagaaggacttttgaaggaaccagaagatgttgttgtagataaagaagggactctctatacagctactcgagatggttggattaaaagattgcgcaggaataatggaaaatgggag

SEQ ID NO: 86334 - DNA, 218 bp, Glycine max
  Clone ID: 700952494H1
ctctctcaagtctcaaccatgtcttccggaaccctagaaaacgagcaacctcaagtggaagaagaacaagcccaagctgaagacaaccacaccaagcaagaagataattcggagatgaaagacgacgatgacagaggcgaagaggaaagggatcaggtagaacaagagaaggatgtggagaaagaggaggaaaaggaggaggaagaagaagaaaagga

SEQ ID NO: 86335 - DNA, 254 bp, Glycine max
  Clone ID: 700952495H1
tctcgagccgaatcggctcgagagtctccatacatcaacttgggaccttaaagagacggcaacgttgtgctgtccgccttgaccgagccagagcttcgtcttggccctcgattttgccctgtaaaactaatcccagtcacaacagaaataatcaatggcaccgaaacagaccaaggctgagaagaagatcgcttacgatgcgaagtgtgcgacctaatggaggagtacggccaaatcctcgttgtaaactccga

SEQ ID NO: 86336 - DNA, 269 bp, Glycine max
  Clone ID: 700952501H1
ctaattctcatttcttcatcgttcgattcttctcctcctaaagatgcagatcttcgtgaaaactttgaccggtaagaccatcacccttgaggtggagtcctccgacaccatcgataacgtgaaagctaagattcaagacaaggaagggatcccacctgaccagcagagacttatctttgcgggtaaacagcttgaggatggtcgaacccttgccgactacaactccaaaaggatcccactctccacctcgtgcttcgcctcaggggtgg

SEQ ID NO: 86337 - DNA, 244 bp, Glycine max
  Clone ID: 700952503H1
aaaagattttggagaagcaatttctcactcctgaaaatctcatcctcttcttctttacatttgttttggataaaacattttgctgatactgaattttattttctcttgttttcgtttcttttcgaccttgtttttttttctgcttcgttgttttcatggagaaagggataggagtagtaaaagaaagtgcattcggtttggttcttcgcctcgggactcgaatcttcgatgccgctcggttttg

SEQ ID NO: 86338 - DNA, 254 bp, Glycine max
  Clone ID: 700952509H1
aagagtttgatcctggctcagaaggaacgctagctatatgcttaacacatgcaagtcgaacgttgttttcggggagctgggcagaaggaaaagaggctcctagcgtgaaggttgcttgtctcgcccaggaggtgggaacagttgaaaacaaagtggcgaacgggtgcgtaatgcgtgggaatctgccgaacagttcgggccaaatcctgaagaaagctaaaaagcgctgtttgatgagcctgcgtagtattagg

SEQ ID NO: 86339 - DNA, 250 bp, Glycine max
  Clone ID: 700952510H1
cctcaatccacggaaatcgaataaagaaacccaaatccttcgctactaccgttatccaaaaccaaaatgcagagtcatttattcacagcatgatatcaatcgataacttcttcatttcacaaaattcagggtagcgttcacattttcccccttctttcttcccttcctcaacaacatactctctactcgcgcggtgccgttacgtgtctcatcgttttcggcgttagtttccttccttctcatgtaacag

SEQ ID NO: 86340 - DNA, 253 bp, Glycine max
  Clone ID: 700952512H1
gcaaaactgtttattttgggcaagcttcagaggcatatgagttctttgcacaagctggctttccatgtcctgctttgaggaacccttctgatcacttcctcaggtgcatcaattctgactttgacaaagtcaaggccacccttaaagggtccatgaaactcaggtttgagggaagtgatgatcctttggacaggatcactacagcggaagctatcagaactcttattgacttctaccgcacttctcagcactc

SEQ ID NO: 86341 - DNA, 255 bp, Glycine max
  Clone ID: 700952513H1
ggccttaggaaaagaggcacctgagtcaatgctggtcagagacacacacccctccccagcaaactctcacacactcacacacaaacgctggcgtttcgccaaatcccaaacgtttctcctttggacaccataaaaagcacagcctctccaaaccttcaccctctctctccctgcgctactgcgccatggaccagcgccatggaccccaacctctcccagagtcagacaccataggaaacgattctcacccaaaaa

SEQ ID NO: 86342 - DNA, 254 bp, Glycine max
  Clone ID: 700952514H1
gtccaggatcgtggtgtttttgactttctcggtaagaaaaaggatgaagaagacaagcctcatcctcaggaggaggtcatcgccaccgagtttcaaaaagtcactgtctcagaccaaggagagaacaagcacagcctcttagaaaagcttcaccgatctgacagcagctctagctcttcaagtgaggaggaaggagaagatggagagaaaaggaagaagaagaagaaggaaaagaaagggctgaaagagaagat

SEQ ID NO: 86343 - DNA, 242 bp, Glycine max
  Clone ID: 700952516H1
cgaaatctctggaacaattgatttcattttcggatactccaccaccttgatccaaaactcgaagatcttggtgaggaagcccagggcaaatcagcagaacagagtggtggcagatggcacagggcagaagaacatgcccacaggaatagtcctccataactgcgagatcatgccggaccctaccctcttggcagaccgcttgagcgtgaagacttacttggccaggccatggaaggcattct

SEQ ID NO: 86344 - DNA, 258 bp, Glycine max
  Clone ID: 700952517H1
gttcttgtgggttgttctgtccctttctttggtccttggagtggccaatagctttgattttcacgacaaggatttggagtccgaggaaagcctgtgggacttgtacgagagatggaggagtcaccacacggtttcgcgaagcttggtgacaagcacaagcggtttaacgtgttcaaagcgaatgtgatgcatgtccataacaccaacaaaatggataagccttacaagctgaaactaaacaagtttgctgacatgacc

SEQ ID NO: 86345 - DNA, 259 bp, Glycine max
  Clone ID: 700952518H1
atttggaacaaacaacaatagaggggttgtggtgctctgtgtgctgcaatttccttttgagcttgtgtttgattcatcaaatcatcaaagatgactgtaggggcaggaatatctgttgcagatgggaacttgatggtgttggggaacaaagtgctgagccatgtccatgacaaggttcttgttacccctgcatgtggtggtgctttgctcaatggggcattcattggggttcaatcccatcacaagggtagccgcacag

SEQ ID NO: 86346 - DNA, 258 bp, Glycine max
  Clone ID: 700952519H1
gtgggcacttatctgaattgagcggggaaatggaaaaagaggaggaggagcagcgcgagtggaggctatacgaaggctacaatgagctccacgcgctggcccaggacttgcacacgcccttcgacgcccccgccgtcttggtcgtcggccaccagaccgacggcaagagcgccctagtcgaggccctgatgggcttccagttcaaccacgtcggcggcggcaccaaaacccgccgccccatcaccctccacatgaaat

SEQ ID NO: 86347 - DNA, 255 bp, Glycine max
  Clone ID: 700952520H1
gcctctctctctatctttttcttttccttctcctagccctcttccctataggagaaggaataacaaaaacaaaaatacacaatggctttcactttcaccagaatcctaattctctttgtctccctctcctctctcaacctcgacacccacgcagcccgtgcgccccgcaccatccagacccgcctctacagcctctgcaagcccaccaccaacatggacctgtgctacaagaccatccttccggaggtggtgggc

SEQ ID NO: 86348 - DNA, 248 bp, Glycine max
  Clone ID: 700952521H1
aacacaacacaaagtgtcacaaacacacacagttccaaactcaaatctcgcctcaaacctctcttgttctcgtttccccactccctcattttccttcctctacccgcatttttctctaaccacccctcacacacttcacttatagagagagagaaagttcagtgcttttgtatagaatcaccaccccattaccctgcatacaccatttaatgcattgattccatctgggtcagtcacaataacagaag

SEQ ID NO: 86349 - DNA, 255 bp, Glycine max
  Clone ID: 700952522H1
attatttaaccttgcaagttccgaatcattcatcggcgtgaactacggacaagtcgctgacaacctgccgccgccgtcggcgacggcgaagctgctccagtcgacggccatcggaaaggtgcgtttgtacggaaccgacccggccataataaaagctctggcgaacacggggatcggaatcgtgatcggagcggcgaacggggacattccggggctagcctcggaccctaacttcgcgaaaacgtgggtgaacac

SEQ ID NO: 86350 - DNA, 254 bp, Glycine max
  Clone ID: 700952523H1
tagtaaatgacaccaaattccaggtcttagacatatgagtaaagactatgaagatatatagttataataatggggtccttgggtaattctttgtgactttaatgctattctttatgattatgaaaagaaaagtggatctaaaaatgtaactcatagggaaactcaagcttttcgtgggcagtaaaaataagtaacttgatcttgtacaaatcttcattgttttgagcttgataatgtcaggtaagtacgttatt

SEQ ID NO: 86351 - DNA, 255 bp, Glycine max
  Clone ID: 700952524H1
cacagaacaaaaacttggtcttcagggaagtaaactggagaaagtagaagttaatgtaggaccaacctctgggttccgcagcatgtctcctgatgagtcaaaggagataaagaatatatatattgactcttctggagggaagccagttactttacagagatcagggtctttaagttcaacaaaagtagatctcccagaggaattcaaggaaatttgcaacttaggaacaatgaagcagagtcctgcaacaggagc

SEQ ID NO: 86352 - DNA, 251 bp, Glycine max
  Clone ID: 700952527H1
ctcgagcgaattcggctcgaggtacccgtgagccatgcaccgacagttggattacatctcttagttttgtccgtggaaggagctttttccgcagcatttggcagggcgtgacgtgagggcgattttgctcacaccgatatctagagtggtccagctccaaacccgaacgaggctgcagtacgcaacaagaagaagcacagtcgtttagggagaaagagagaaaaaaaggctaaaggtacacctacatacac

SEQ ID NO: 86353 - DNA, 252 bp, Glycine max
  Clone ID: 700952528H1
ggcagtccgcgttccacgatttgctcggcgaaggcatcttcaactccgacggcgacacgtggctgttccaacgtaaaaccgccgcactggaattcaccacgcgcactctgcgccaagccatggcgcgttgggtgaaccgagccataaagcacaggttctgccccatcctagccacggctcagaaagaaaacaaatcagtggatcttcaagacctcttgcttcggctcacttttgacaacatatgcggcttgg

SEQ ID NO: 86354 - DNA, 254 bp, Glycine max
  Clone ID: 700952529H1
ctcccgggaaaaaaagtaggtaaaaaaatatgctaagtataaattgtctactgatgaaatacgaaagctgatgatattgaaaaaaaaagaattgtaaataaggttcaggttcgacttccatagagaatatagatgatattgtctataatgatagaaaaaaataaaaaactttcgaaagattttatccaattgaaattttaaaaatgactgggataaacttaagaattcaattattgaaattgaataagtaaaca

SEQ ID NO: 86355 - DNA, 77 bp, Glycine max
  Clone ID: 700952530H1
caaacccttggcggctgcgagacccgttgtgtgctctctactctctctttttgttcactagccctctcttcttcgcc

SEQ ID NO: 86356 - DNA, 256 bp, Glycine max
  Clone ID: 700952531H1
ctttttggaattttccagataccctcatttatggacataatcactgacctcgccatgttcattactccgctatggattgcggttatcgtcggcgtcgtcgtgggctgggcgtggaagcccaaatgggcctttcaccccaaagacgctcttctcaagtttcgctctcctcgccctcccaatccccaaaacgacaccgcttttacctactccgccaccagttcctccgcgcgtgagaaagacgcgagtgggagtcctg

SEQ ID NO: 86357 - DNA, 254 bp, Glycine max
  Clone ID: 700952532H1
ctcatttatagtttactattgaaagatgggtttgaaaatggcaatactgatcctaggcctgctggccatgttccttttggtctcctcagaggtggcatccacgaattcaaaagaggtgacaaatggagttgaagatgccaaatatcctggtggaggctatggtgggggttacccaggcaatggcggtggtggctatcctggccgtggtggtggctaccctggtcgtggtggtggctatccaggtcgcggtggtg

SEQ ID NO: 86358 - DNA, 84 bp, Glycine max
  Clone ID: 700952533H1
gttttgcagaagattccaatcggagctcagaaaagaaagagacctaatcgccgatcgcgtcgaaagttcgttgttgtgctgtga

SEQ ID NO: 86359 - DNA, 263 bp, Glycine max
  Clone ID: 700952534H1
tcgaactggtgcacaggcaccacgagcgcttctccggcggcggcggtgacgtggatcaggtcgaagcggtgaagggtttcgtaaacagggacggcctgcggcggcagaggatgaatcagaggtggggtgttagtaattacgacagaagaagaaaaggcttggaaacaacgacgacgacggaggtggaaatgccgatgcgcgcggggcgcacgatgccctcggcgagtacttcaccgaggtcaaggtcgggagccccgggcaac

SEQ ID NO: 86360 - DNA, 258 bp, Glycine max
  Clone ID: 700952535H1
ttcatctccctctttcttcttttcagctactttaggtctctctctctctctctctctattttctctctctctttcttcctttctttaatacttattaattcatcttttttatctttctttctttctttccccttttgtatttctgggttcgatattgttatcggttatttgtgcactgcttccgccggggctattcaggaatcatggctagggttttggctcagtctgttaatgtccctggtctagtggctgagcata

SEQ ID NO: 86361 - DNA, 253 bp, Glycine max
  Clone ID: 700952536H1
gggttttagcgcagttcttctagatttaaggaagatgggtaaggaaaaggttcacatcagtattgtggttattggccatgttgactctgggaagtccactaccactggccacctgatctacaagcttggaggcattgacaagcgtgttattgagagatttgagaaggaagctgctgagatgaacaagaggtctttcaagtatgcctgggtgcttgataagcttaaggctgagcgtgacagaggaatcacaatt

SEQ ID NO: 86362 - DNA, 254 bp, Glycine max
  Clone ID: 700952538H1
aggggagcttatgcagtaagtgtgaccactgaccactatgatctcttttgagtttatagatctattttgataaatgtcagtttccttctcaatgtaacaaactcaacacaaaaccagggattaggcttgcatgggaaactaagctgatttaatatggtatttgtgggggagcttgtgcagtaagtgtgaccactgaccattatgatctcttctgagttcataggtctattttgataaatgtgtcagtttccttc

SEQ ID NO: 86363 - DNA, 254 bp, Glycine max
  Clone ID: 700952539H1
cacaaggcagaaagcaagctcatcctagagttttaaaaatggcagcagcctcctccatggctctctcttccccatccttggctggcaaggccgtgaagctgggcccatcagcccccgaagtcgggagggtcagcatgaggaagaccgtcaccaagcaggcctcctccggaagcccatggtacggcccagaccgcgtcaagtacttgggcccattctctggcgagcccccgtcctacctcactggcgagttccca

SEQ ID NO: 86364 - DNA, 254 bp, Glycine max
  Clone ID: 700952540H1
ggcaaatgcgaacaaaggtaaggtgaaatgtgctgatagctccagtttgggctaaggctatggccaatattgcagcctttcttcaatcagtcattgcattgcatatatttgcaagtccaatgtatgagtatttggataccaaatatgggatcaaagggagtgccctggcttttaagaacttgtcatttcgagtcttggtaagaggtggctacctgactttgaacacatttgtatcagctctattgccctttctt

SEQ ID NO: 86365 - DNA, 78 bp, Glycine max
  Clone ID: 700952541H1
cccaccttcctctccttcttacgtactgcttaaggtctacacaagtactctgcttcttctcgccctattgagctttgg

SEQ ID NO: 86366 - DNA, 262 bp, Glycine max
  Clone ID: 700952542H1
gcgatattccgcgcgagcaaatgggtctgcagctgtgtatccggcagacggtacgcaacgaatgatggtgaaattggtttgaactagggcaatttaagacgtgtaccccaacagctgatgacattggacatgtccttaaattcgagtgtactgtagttgatgcagaggccacagagagaaatggaagaagcatgctgtgtatgcttagttgtcatactgatacttgctctaacattggcatggagcgtgctgaactggttat

SEQ ID NO: 86367 - DNA, 252 bp, Glycine max
  Clone ID: 700952543H1
aggaaattgctacctttgcttctggcaaagagatttccgagttggctaatcacgtgtcactctattcaggatgttcacaccatggacaccaaatattattggccaagagattgataaaagatggaactaatctttggaaggtgatgtctccaaacaatcaccacattccttgggagaatgcagtgtatgagattcaagagcaattcatgaagattgcttcttgttgttcaagatctctctcacctcaggacc

SEQ ID NO: 86368 - DNA, 76 bp, Glycine max
  Clone ID: 700952544H1
atttttgcttctttaatccctcgcctatatcttcagaaaattagatctgcttcagatctagggtttcccttttcca

SEQ ID NO: 86369 - DNA, 251 bp, Glycine max
  Clone ID: 700952545H1
ctcttattttggttgtgtgtgccgtggccatttcaattgaaagtaccatggaagccacttctacctcttcaagctgcagcaatggcttctttagtctccgatcaacaaatagtggcgaatccagggtccgtggttgcggaaaatctgatggtgtggccatgtggttcatcaatggtgtcacaaccgctttctttgcctccttggaacgttgctgcatccgaattgccaccgaagaagacgtcgaagatggc

SEQ ID NO: 86370 - DNA, 72 bp, Glycine max
  Clone ID: 700952547H1
cgaacatatttgatgcgagaaggaattgacgccacagagatggtgacagtatcagtgagctggattatgtcg

SEQ ID NO: 86371 - DNA, 256 bp, Glycine max
  Clone ID: 700952548H1
cgagataactagaaacagtgtgatgaaaatgaaggtccttgttttcttcgttgctacaattttggtagcatggcaatgccatgcggtacgatatgattccctctccgaatgaacactggctatggtgcccgtactccggaggtgaaatgcgcaagttggaggcttgctgtggaagcacacaacatctttggctttgagaccattcctgaagagtgcgttgaagcaacaaaggaatacatccatggcgaacaatata

SEQ ID NO: 86372 - DNA, 264 bp, Glycine max
  Clone ID: 700952549H1
aagtaatctataagtttctaaaatcattggaaaattatgggttaatagtgtgaagcattggatcccagagaaagatctccaaaatgcgcgaggcagcatatatggacttgatggattagtatcaggtagggtgacctcctgtgaagctccatcaaggatgcctcggtcacgctctgttcaaaattgagaggccatttgtgtgtgctgtcgatgattgtcaggcaagttacagaagaaaggaccacctgactcggcaccttctac

SEQ ID NO: 86373 - DNA, 251 bp, Glycine max
  Clone ID: 700952556H1
atagtttaaaaaaaaagaagaagaaaaagttaaaaaagttttcctcatgaattgttgcttctcatatagttttttcttttcccactttcaagttagaatacacagaattatgagctgtgaactcttattattcatttaatgttcatatgatcatctgggtctttcttgattatggagtctactaccttctgtcgataatgggaacgaatctcagcactcccaaaactgagaagtcttctgatgatggtgaa

SEQ ID NO: 86374 - DNA, 244 bp, Glycine max
  Clone ID: 700952557H1
ccaaaaggtactaatgccgtggagtcggcaaatcctggcaagttgaggttacttgacttgactgaaaatgatagagtgttcaatattggtaagtacagcaagaatgaaaataaatctgatgcccacagaatggtgaggactggtcttcaaaaagaaggatcaagagtgatttttggtgttcctaaacctgggaagaaaagaaaatttatggaagtaagcaagcattatgttgcatatgggacgc

SEQ ID NO: 86375 - DNA, 76 bp, Glycine max
  Clone ID: 700952558H1
ctcagaaactggatcccatagactggcttacgtatgagccatatctctgggagaatgagagacagtcttacctacg

SEQ ID NO: 86376 - DNA, 76 bp, Glycine max
  Clone ID: 700952559H1
ctcttcttcagtggtggaagctactagaacactagtttgttgcgcactgcgatgacgaagtggacggttgcttccg

SEQ ID NO: 86377 - DNA, 100 bp, Glycine max
  Clone ID: 700952560H1
gctcgcgagattcgcgctctcaggtcttccaatgtggtgcttcttcgtgggttgggagtgccttagttttctaagcctgcacagcctgatgcattgtaac

SEQ ID NO: 86378 - DNA, 252 bp, Glycine max
  Clone ID: 700952561H1
ttcacgcttcctctgtttgctcgcacacgtcgtttttgtctttttgttgcttcggagccaactcaacaacaacgccgtgcctaatccttaagaataacgaattacaacaaccaaccatgttgcattgtctcaacacttcctgttcggacatcacagtcttggaaagacaacgggaagcaaccatcaagtgccagaaccaccaaccagcctacttaacggactttaacgccgtcttcccttcttcttcttctt

SEQ ID NO: 86379 - DNA, 262 bp, Glycine max
  Clone ID: 700952565H1
tcaaaattcatgtctccctcttccctccacgcgctcctcatcattctcttcctaggttccgcacacgcgctcaaggtccccttccgagtcaacgatgttctccccgttctcccccacggaatctcctggccgctcctcaacaacctccacagcgccgtcgacttgctcccttccttcgtcgccgccgtccctcccgataacgattccgttcagtggagagccgcatgcttttacgataatcaagcctccctcgaattcaccg

SEQ ID NO: 86380 - DNA, 262 bp, Glycine max
  Clone ID: 700952566H1
ctctgctcgtgcctctagggttatcatatctccatttccatttcctctctctcagtttccaagaatcttaagctatgggaaagtcttacccaaccgtgagcgctgattaccagaaggccgttgagaaggcgaagaagaagctcagaggcttcatcgctgagaagagatgcgctcctctaatgctccgtttggcatggcactctgctggaacttacgacgtgagctcgaagaccggtggtcccttcggaaccataaagcaccc

SEQ ID NO: 86381 - DNA, 250 bp, Glycine max
  Clone ID: 700952572H1
ctcacactcactgcagatctcaatccatggctaccattgttagcatcaaggcccgccagatctttgacagtcgtggcaatccaaccgtcgaggtggatttgacatgctccgatggtacttttgctagagctgctgttccaagtggtgcatccactgggatttatgaggcccttgaattgagagatggaggatctgactaccttggaaagggtgtatcaaaggctgttgacaatgtgaacaccattattgc

SEQ ID NO: 86382 - DNA, 227 bp, Glycine max
  Clone ID: 700952573H1
aaatatatcatcaattataagcatgggtttgtggaacacaacgaatgcagtgtcttgccgctttcacaagtttggtgatgaccaaaagaatctggtcttccaaggtgatgccacgtcttcttccaggggcatagaactcacaaagttagacggtggaggaaaaccagtgggtggcagtgtggggagagtgttatactcttctccagtgcacctttgggaaagctcta

SEQ ID NO: 86383 - DNA, 252 bp, Glycine max
  Clone ID: 700952574H1
caaatgggtctgcacctgtgtatccggcagccgttacgcaacgaagtggtcggtgaaacttggtttgaagtagggcaatttaagacgtataccccaacagctgatgacattggacatgtccttaaattcgagtgtactgtagttgatgcagaggccagagagagaaatggaagaagcatcatgtgtatgcttagttgtcatactgatacttgctctaacattggcatggagggtgctgaactggttatggct

SEQ ID NO: 86384 - DNA, 240 bp, Glycine max
  Clone ID: 700952575H1
tgagagtggatgcagttggtaatgttgatgttaaggtcaatgttgttgcaagcgaaagtgaaacagaggcaattgaaaatttttcgtgcacctgtgaagtagttgatgtcaagtgtgataaccgtgcttctgaaggactaagcggtgacaaagagacagctggcaagtctcctgccattcgcatgtcgtcggactatgtaatagcaacagatagacccccaatcttgggggcttttgaaa

SEQ ID NO: 86385 - DNA, 251 bp, Glycine max
  Clone ID: 700952576H1
caaagatatcattgttttgtggaggaggaggattgaacatgtaccctggtgctgaagtttttccaatcatgaatcatcatcatcaaccatggtctatgactatgccacatcatcatcaccatcatcaggttcatgacccttttcttgtccctccccaaccttcaccctatgcaagcttgttcaacagaagaggtccttctcttcatcagtttgcatatgatcatcatggttcatcttctgaccatcttagg

SEQ ID NO: 86386 - DNA, 231 bp, Glycine max
  Clone ID: 700952577H1
ctctctctctccaatggccaaagacctcgaaacggagattcaaagtgggttgcctcacaaggactaccacgacccaccccccgccccattctacgaccccgccgagctccgaaagtggtccttcttccgagccctcatcgccgagttcgtcgccaccctcctcttcctctacgtcaccatcctcaccgtcatcggctacaaccaccagacagccaccgccgccgagccctg

SEQ ID NO: 86387 - DNA, 253 bp, Glycine max
  Clone ID: 700952578H1
aagggcatatcaaagagcaaactcgccgctgacttcaacttgaacttgtcgttcaaacgtggcaagctggcagccacaaaggccatagccaacactatcctccaccgctcccaaaacgacgacgccgtttacccgcgcgactacgagttcagctgcagcaacagccccgcgctcttccacgtcatcaagcgcagaccaataagcaccgtcaccaccaccaccgctgcaccaccaccaccaagttcccccacca

SEQ ID NO: 86388 - DNA, 261 bp, Glycine max
  Clone ID: 700952581H1
gagccattgaactttgactataatattcagagttcagattactcactctaatcttctaagttttcattttggggtttaagtttctgaaggaaaaaaaaatgataaagtttgttctatttttgttctgctttgcctctgcactgaccctttcagtatcggagtccaaatcagcttcagtgcaacctcatgctgctgaatctttctctgttggatatattcagatgaagactgcagcgaactgttcttacctggtagttatat

SEQ ID NO: 86389 - DNA, 257 bp, Glycine max
  Clone ID: 700952582H1
tgtggttgaaagttaagaagtagcaaagatgtttccattcgggcacaagggtcaaaagataaaggggactatggtggttatgcagaagaatgtgttggatatcaacagcatcaccagtgttgacgggatcgtcggcaccggcttagacttcttaggcagtgcactcgatacagttacttttttagcctcctccatctccatccaacttattagtgctaccaaggctgatggtgggacaggaaaagttggaaaggcta

SEQ ID NO: 86390 - DNA, 255 bp, Glycine max
  Clone ID: 700952583H1
cttcttcttcttttgtttctttttttttctgcgtaggcaaagcgagagagagaaaagcgtgaatcatgtcggacgaagagcatcacttcgattctcaggcggatgcgggagcgtccaagacgtatcctcagcaggctggtaccattcgcaagaatggctacatcgtcatcaaatccaggccttgcaaggttgtagaggtctctacgtcaaagacaggcaagcatggacatgcaaagtgtcactttgttgcaattg

SEQ ID NO: 86391 - DNA, 240 bp, Glycine max
  Clone ID: 700952584H1
atcaattcatcatactcactgtcccaaattcctcttaggtcccaacccagttactatgattccatctgataccgttaatttatgctcgattatttcgcagttatgtcagagttcgtggcccttgtctgttggaacaactctgtcagcttctgtgttgctcgtatctgatatcctttgtgatgcttaagtagcatggtgtctctatggtgatatctttgaatatagggtgttggttgtgac

SEQ ID NO: 86392 - DNA, 251 bp, Glycine max
  Clone ID: 700952585H1
ccgtaacggcgtccaaaggggaagcgccaagttcgatcgcccgctcaagccccgcccccgcccctcttccccctctccgggatccgcccttcgccgccccaacgccgccgccagaaacggcgacgccggtgagtcccctccaaaacctagacagacacaaatagagtgtgtagtgtgttttgtagagagagtgtaatgaagctctaactagtaagtatctacgattaggacgccataatgaagctcgctag

SEQ ID NO: 86393 - DNA, 252 bp, Glycine max
  Clone ID: 700952586H1
gcactttggtaaggtgagagaataggaaaaagggaaatatggcatttgcaggaacaactcagaacgtgcaaccaaggtatatgatccctttgtgtgagctttaaatagaggggaagagcagaacaaatgaagaagagaggagataaggatcatataccttggttgcactttggtaaggtgagagaataggaaaaagggaaatatggcatttgcaggaacaactcagaagtgcatggcttgtgacataacagt

SEQ ID NO: 86394 - DNA, 232 bp, Glycine max
  Clone ID: 700952588H1
tggagctctcactctctccaacttcacatcgagttccttccacaattcccactttgaattccgctaaactatcatccactaaggccaccaagtcacaacaacctttgttcttaagattttccaaacacttcaactcaattgggttgcaccatcacagtcacagatgctgctcaaatgctgttcccgagagaccccagagacccagttccataagggcttgcactggagttgg

SEQ ID NO: 86395 - DNA, 249 bp, Glycine max
  Clone ID: 700952589H1
ccaacatattcttcagttagctcccccaacctatacacttcaccaccacaccacaaccctaccctctctctctgtcatggtcattggaggagccttccctcgtttcgacccaatcaccaaatgtagcacccaagaccgctccaaccagaccatcgcctcggacctcgatggcaccctccttgtctcccggagtgccttcccctactacttcctcgtcgccctcgaagccggcagcgtcttacgagccct

SEQ ID NO: 86396 - DNA, 250 bp, Glycine max
  Clone ID: 700952590H1
gaatcttctcagcatcaagctacaagtgtaccaataaaaattaagtccaatagtcttatttttgagccaccaaaggatagtctcacaattgcagagcagaatagggatgcaaatgttggtgcactttctacagcaaaggggaatggagcagctgttcaggtgcttaaaaagcctactggtgcttttggggcactcctggggagttctgcttcaaagaggaagcttggtcctggtaagggcaaggaagaga

SEQ ID NO: 86397 - DNA, 247 bp, Glycine max
  Clone ID: 700952591H1
atcgaagaaaagagaatgagtagacgctcgagcagaactgtctacgttgggaatctacctggtgatatccgtgaaagagaagttgaagatttgtttctgaagtatggacacataacacacattgacctaaaggttcccccaagaccacctggttatgcatttgtagagtttgaagatgctcaagatgctgaggatgcaattcgtggtcgtgatggctatgattttgatgggcacggttacgggtgga

SEQ ID NO: 86398 - DNA, 251 bp, Glycine max
  Clone ID: 700952592H1
caagaaaataaagtttatcaataacaacatggacatgaagttgaatattccagcaattaatgttttattcttattgctagctatttctagtacaactcaatcggttgacattaatataaaaaaatttggcggaggtgcagatataacacaggctttgacaaaagcttgggaagaggcatgcgcagcaacaagtgcaagcaaaattgtgattcctggtgggtcatacaagatggcagcagttgatttaaaag

SEQ ID NO: 86399 - DNA, 228 bp, Glycine max
  Clone ID: 700952593H1
gaactttaaaggtgttgcaaattacaatcgttggagaatgctttggacctatggccattttacacggaagagcattgtacacgttgcttatgtatttatgtaattcttcgtatatagttggacttgcgagtgagacaaacctgtggaattgtatcaccggtgcttcgtcaaaatgcttgcgttcagctgctgctccagtaattgggttttctaaaaaaaaaaagaaaa

SEQ ID NO: 86400 - DNA, 232 bp, Glycine max
  Clone ID: 700952594H1
tctcaacatgcagagattgtcatcgtttgagtttaatgctggaagtgcttgatcaagaagcagcagctctatattcattcaaatcacaagctcagaggcttgaagcacttcatcaatttaaatcgggaaaggtttctatacttcttgcaactgatgttgccagccgtggtttggatattcgtacagttgaccttgttatcaattatgatgttccaaggtttccacgagttta

SEQ ID NO: 86401 - DNA, 252 bp, Glycine max
  Clone ID: 700952595H1
cgcaagaaaaagaaagaatcccaggcgaggagaaagatggaggggaaggagcaggatgtgtcgttgggagcgaacaagttccccgagagacagccgattgggacggcggcgcagagccaagacgacggcaaggactaccaggagccggcgcgggcgcggttggttgacccgacggagtttacgtcatggtcgttttacagagcagggctagcagagtttgtggccacttttctgtttctctacatcaccgtc

SEQ ID NO: 86402 - DNA, 257 bp, Glycine max
  Clone ID: 700952596H1
gcagctccctcctaaatgattactcccgctcggcgtgcatcgccgccgattgagctcaacaacaacaacaaaatacaccataagactcaccgtagcgcaccacagccaaacgcgatctcaacgatgaccagcttctgaaattccaacttcgcccttcatcttccgtatacttttttatttccggtgaggtgagttccatgcctaggtccaagagcagccgcagcggccagatcgagagtcaccggcagtgaaggtcg

SEQ ID NO: 86403 - DNA, 273 bp, Glycine max
  Clone ID: 700952601H1
cgctcttcttctcatcaagcacagagttacagactcaccgatcttccgattctctttcgtcttggtttatgagctcgaaggagagacccactcttggtggcacgcggattaagacccgcaaacgaaatattgctgcgccgctggaccctgcagcattctcggatgcagtggtccagatttatttggataatgctggtgatctggaacttattgctaagagtattgaatcttcagaccttaacttttcaagatacggtgacaccttttttgagg

SEQ ID NO: 86404 - DNA, 267 bp, Glycine max
  Clone ID: 700952602H1
cgagccgcaaagaccacaaaatcagaatctactggaacatttaccactacgccgttggatactccaccataatcatcagtatcatcaacgtctttaaacggtttgatgcattggagacttctgtacgggatcgctacaatgactggaagcatgcttacattggcatcattgcagctttgggtggcattgctgtgcttttcgaggcctacacatggattgttgtgttgaagaggaggaactcagagaacaagacagcacatggtgtca

SEQ ID NO: 86405 - DNA, 261 bp, Glycine max
  Clone ID: 700952609H1
ggaaaagcttctctattagctgcacttgacgacgatgttggcttgcatagggacatcttcatctctgcttccccaggaaatatgcacaatgcattggttggacaccggacatacttgaacttaaagactataaggccaaatatggcattgatgggtcagcttttcctgaataaaaccatagagtggtcagagtttcaggatgcagtggttgaaggtcaccaaaatagacaaggggaactaaggcagaggacgccaaaacaa

SEQ ID NO: 86406 - DNA, 256 bp, Glycine max
  Clone ID: 700952611H1
cttttagggtttcctttttgtttctcctttccagatctgcatcttccatttcttaggattaagcggtgagattcgtgaatctgagaaatgtcggattcttctcgggaggagaatgtttacatggcgaaattggcggagcaggccgagcgttacgaggagatggttgagttcatggagaaggtagcaaagactgtggaggttgaggagttgacggtggaggagagaaatcttctctctgtggcttacaagaacgtga

SEQ ID NO: 86407 - DNA, 243 bp, Glycine max
  Clone ID: 700952614H1
gatacattcaatctcaaaaattgttttaaaactggcaatggcagcccaagccatggctcaattccgtttctctcctctatcttctcattaccgttaccattaccagtacaattaccattccaccccttctttcccgtccccgcgacgtcacccccgcaaccaaaggctccacctttccttctccggcggagacagaggcggatgcggcggcggcggaggaagatgagattccgatgaggagga

SEQ ID NO: 86408 - DNA, 254 bp, Glycine max
  Clone ID: 700952615H1
cggatgcaggctgatgcaacattacctgctgctcagcgccgaaattacactaatgccttccatgcactctatcgaattactgctgatgaaggggttttggcgctttggaaaggtgctgggcctactgttgttagagccatggcattgaacatgggcatgcttgcatcttatgatcaaagtgttgagttcttcagggattctgttggtcttggtgaagctgctactgttctaggtgcaagttccgtttctggatt

SEQ ID NO: 86409 - DNA, 259 bp, Glycine max
  Clone ID: 700952616H1
ctttcttccatcttcttctcttttcacgtcattatcctaaacttgcagattttcacatcccaagcaacatgaaggggaggttcatgtttctgtcggtgctcctttgtgccacctttcatgtctccttctccattactgacggcttagtacaaacggcaacttcgagctgggtccgaagccctccgccctgaaaggaactgtggtgattggtggcagccactcgatcccagaatgggagatctctggcttcgtggagtac

SEQ ID NO: 86410 - DNA, 269 bp, Glycine max
  Clone ID: 700952617H1
cagaaaggagagagagaagctgcgcacctcttcatactagtgctgattgctgaaactgccatcgctcgccatttgcacaaagatcccaacaacacttgaaagttgaaacagaaaaacaccaatccctcatcgtactgttccgttatcaattctcgtgtttaaggacacaatttgcttgatacattttcaagttttcatctacatgttttgattttgaagaataaggagtatgcaattgactactacagatatggttttactataagtgg

SEQ ID NO: 86411 - DNA, 266 bp, Glycine max
  Clone ID: 700952618H1
atagtaaaaaaaggacattcattcatctatggctacccttattgctcccagcaagcactctccccaagaagatgctgaagctctcagaaaggcttttgaaggatggggaactgatgagaacactgtcatagtaattttgggtcatagaactgtgtatcagaggcagcaaatcagaagagtttatgaggaaatttaccaggaggatcttgtgaagcgcctagagtctgagatcaaaggagactttgagacagccgtgtaccgatgga

SEQ ID NO: 86412 - DNA, 265 bp, Glycine max
  Clone ID: 700952619H1
ctgcattggagctggctatgttggtggcccaaccatggctgtaattgccttgaagtgtcctgagatcgaggtggtcgtggtggacattgctgcaccgcgaatcaacgcgtggaacagcgaccacctcccgatatatgagcctggccttgatgatgtggtgaagcagtgcagggggaagaatctcttcttcagcactgatgtagagaagcatattgccgaggctgacattatctttgtctcggtgaacaccccaacgaagactcag

SEQ ID NO: 86413 - DNA, 242 bp, Glycine max
  Clone ID: 700952621H1
tgcatcatctatctatctatctccctttccttctctcccaaagctaaacactaaatcaaaaaccatcctttagctccatcgcttgtcgttgtccttatcccggctttcttgtcttcaatcgctttcaaagatcatttgaattgaagcaaaatggggagtcatatgagcaagaagatccctgagacttcttcgattggcctcagcaccgacttgcactaaaatactgagttgagttcctatga

SEQ ID NO: 86414 - DNA, 207 bp, Glycine max
  Clone ID: 700952624H1
aattcactctgtacaattcttcgttcgtgctctgcagttatatccttgttgcgcgtcaatggcggacgctgaaaccttcgcttgccaggctgagatcaaccagcttctaagtcgcatcatcaacacattctccagcgacaaggagcctgtcttgcgtgaactcatcagcaatgcttctgatgctttggataagattcgattcgagag

SEQ ID NO: 86415 - DNA, 257 bp, Glycine max
  Clone ID: 700952625H1
gccgcagcttgaaacagagcagaggaccttgaagagctatggctgtcggaaagaataagaggatttccaagggaaagaagggtggcaagaagaaagccgctgatccctttgccaagaaagactggtacgatatcaaggccccttccctcttccaggtcaagaatattggcaaaaccctcgtctctcgtacccagggaaccaagattgcatccgaaggactcaaacatcgggtttttgaggtctcattggctgatctc

SEQ ID NO: 86416 - DNA, 249 bp, Glycine max
  Clone ID: 700952626H1
gtgtctgtctctgtgtttgcggctgaggattccgaacgagcgaccttcttcgtttctcgcaaagtttaagtcatcatgggtaaggaaaagactcacatcaacattgtcgtcattggacatgtcgactctgggaagtcaactaccactggtcatgtgatctacaagcttggaggtattgacaagcgtgtgattgagaggttcgagaaggaggctgctgagatgaacaagaggtcattcaagtatgcctgg

SEQ ID NO: 86417 - DNA, 251 bp, Glycine max
  Clone ID: 700952627H1
taaatgattccttccttatatttgcatcacatggtttatgggaacacttgagtaaggctgacgcgggggatatggttcacagcagtccacgcgcgggtagtgccaagagacttgtcaaggctgccctacacgaagcagcaagaaagcgtgaaatgcgatattcagacctttacaagattgacaagaaggttcgtcgccattttcacgacgatataactgttattgttttattcttaaaccacgaccttata

SEQ ID NO: 86418 - DNA, 254 bp, Glycine max
  Clone ID: 700952629H1
gaagagaaagattatgggtatcgtggaagaggctcacaacgtgagaatagtagggaaggggaatgaaatcgtgattcttgctcatgggttcggcacggaccaatcggtgtggaagcaccttgtaccgcatctggtcgatgattaccaagtgatcttgtacgacaacatgggtgctggtaccacgaacccagactacttcgacttcgaacgttactacacgatcgatggttttgtctatgacctactcgccatct

SEQ ID NO: 86419 - DNA, 256 bp, Glycine max
  Clone ID: 700952630H1
ttttcttttcccctccctctggcaggaagggcagggaaaacggcaatttaagagagacccttttcctctttctctccacattccaagtttccaacctaacaagaccttgtccatctaaaatatgagttccaaagcgtggcttgcgttccttctcctggcactggccatggtcgctgaaacatatgccacaatagatgaatttgcaactacgttagaagaatttgaccctattatctctgatggtgatgctgatctc

SEQ ID NO: 86420 - DNA, 258 bp, Glycine max
  Clone ID: 700952631H1
gattcttcttcctcctctggcagcaggagtcaaagttgttgttgcgcgccatcgttccaacgaagaaagatgcttctatcttccgccgccatcgttgccggaaccttgtgcagcaattcagtcagcggagtcagtttggcagctgaattcgccgatatgccagcgcttagagggaaggattatggcaagacaaaaatgcgatacccagactacactgaaactgaatcaggactccaatataaggacttgcgacctggg

SEQ ID NO: 86421 - DNA, 165 bp, Glycine max
  Clone ID: 700952632H1
ggaggcttttattcttggatgaaacaaggtctccgtatcaaggaactcaaacctgagacagcactttccatcctcaatgaggaagctgaagcaattctggaggatgttagtccttctccttggcaacttttaggttatggtacagtacttattgcagggcggtag

SEQ ID NO: 86422 - DNA, 263 bp, Glycine max
  Clone ID: 700952633H1
ttgactccagatcatgaactcaacaagaatccaaggatatcagacacaataccagatacggtaatcggactcactgggttttcaactactggatgcgatacggaagcagctcgatatattgatgagtgccaaccgtatcggcgaagtccgagtcgtcaatcgcaagtgactacgatcgtgacggctgtcgtctctacctcgacggtctctggactcacgaactctcccaggtcctgaaaatggatataggccctggcactaag

SEQ ID NO: 86423 - DNA, 266 bp, Glycine max
  Clone ID: 700952634H1
caaggcagaaagcaagctcatcctagagttttaaaaatggcagcagcctcctccatggctctctcttccccatccttggctggcaaggccgtgaagctgggcccatcagcccccgaagtcgggagggtcagcatgaggaagaccgtcaccaagcaggcctcctccggaagcccatggtacggcccagaccgcgtcaagtacttgggcccattctctggcgagcccccgtcctacctcactggcgagttcccaggtgactacggctg

SEQ ID NO: 86424 - DNA, 250 bp, Glycine max
  Clone ID: 700952637H1
cttctctctcacgttttccgcttcagttttctcgggaaaatcatggtgaaaggtccaggcctctactctgacattggcaagcgagctcgcgatcttctgttcaaggattatcagaatgaccacaagttcaccatcaccacttgaactgccaccggagtggagatcacttcaactggactcaggcaaggtgagctatatttcggcgatgtcagcactaaggtgaagaacaataacatcgcgactgatgtca

SEQ ID NO: 86425 - DNA, 255 bp, Glycine max
  Clone ID: 700952641H1
gaagaattgatcaatgggcaagtctgtagttgagaagctactttggatggcaattgtgtgcttggtgctgggtgtaatttccattactcccaaggcccaagcagcagtgacatgcaaccaggtggtgagcaacctcaccccatgcatttcttatgtgctcaatggtggcaaaaccgtgcctggcccttgctgcaatgggatcaagaccctctttaacctcgctcactccacaccagaccgccaaaccgttggcaa

SEQ ID NO: 86426 - DNA, 194 bp, Glycine max
  Clone ID: 700952642H1
tagaggttgaagcagcggcttcttagtgagtgcttgtctgagattcaatggcgttcattggtgcagtcaaattcttgctgcagtacttagttctattatgcctcctcaactatctacctctttctcaaggtaagcagaactggaatgaagggtacccatttataaggagagcaagttcattgggttataatggg

SEQ ID NO: 86427 - DNA, 251 bp, Glycine max
  Clone ID: 700952645H1
atggctcgtcactccttgctcttagccctcctcctcttcgccgccgtggccaccgccgcgatggcgtggcgcgtccgacgccgacgacatcctgatccgtcaggtggtgccagatgttggcgaagcgaagaggaggacaacctgctgaacgccgagcaccacttcgcacgcttcaaggccaagttcgccaagacctacgccaccaaggaggagcacgatcatcgcttcggcgtcttcaagtccaacctccg

SEQ ID NO: 86428 - DNA, 251 bp, Glycine max
  Clone ID: 700952646H1
caagattgacaggcgatccggcaaagagcttgagaaggagcccaagtttttgaagaacggtgatgctggttttgttaagatgattccaaccaaacccatggttgttgaaactttctccgagtatcctccacttggtaggtttgctgttagggacatgcgtcaaactgttgctgtgggagtcatcaagaacgttgagaagaaggatcctaccggagccaaggtcaccaaggctgcccagaagaagaagtgaa

SEQ ID NO: 86429 - DNA, 253 bp, Glycine max
  Clone ID: 700952647H1
gaaaagcataacaagcagagcacattgtttagtgctagcatttccaggtcaaggccatatcaatcccatgcttcaattctccaagctattggagcgtcaaggggtgagaataacacttgttactactcgtttctattccaagaatttgcaaaacgtgcctccttccattgctcttgaaaccatttctgatgggtttgatgaagttgggccccaagaggctgggagccccaaggcctatatagatcgcttgtgc

SEQ ID NO: 86430 - DNA, 258 bp, Glycine max
  Clone ID: 700952648H1
gaagtgcaaaaacagtgtaacaaaaaggaaaagaaaaccaatatgaagttcactataatcacaatatttttctctttatttctacttgactttggttttgcacaacagggggatcttgacatatcaagatttgaggaaaaccaaatacaaaatataggccaggctttcttaagtgcctggactcaagcatgtgcatcaccaactgctgtcaaaattgtgattccagctggcacataccaaatgggtgcagttgatgtc

SEQ ID NO: 86431 - DNA, 256 bp, Glycine max
  Clone ID: 700952652H1
agcgatccagagcctgagcttatcccttaagagaaatcctctctcttatccatttcccatttggcttgctatgagtcatccatcccattcttctatgaccctatgaagtgtaaaatctttcatggctgtgagagacaactccctctgttggagcgtagcagtcaaaacccttggaatttacattcgaaaactgatcaagatgtgtaatatcaacaaatcaaccatgctccgccctgttagggttccgaaatggcag

SEQ ID NO: 86432 - DNA, 102 bp, Glycine max
  Clone ID: 700952656H1
caaaagagtaagatcgttctcagtacatggtctccttcggtagcccgcattcgccctaagatgctatatgcaacatccaaggacaagctcacaagggcgctg

SEQ ID NO: 86433 - DNA, 254 bp, Glycine max
  Clone ID: 700952657H1
caaggatacttgtcgtcgtttctcaaatccaaaacctcgcttgactcgattgggcgtgtgccttgtcgtcgtcgtcgtcatggcgacgctgctaagaaaactgtgcgaatcggcgacgatgaagcgatccggctctcactctcaccctcaccctctcccgtcctcggaacaagcacgcccatcctcccctcttggcgccttcgaccctctccctgccgacatcctcatgcaaatcgtccgcctcttaggcccca

SEQ ID NO: 86434 - DNA, 251 bp, Glycine max
  Clone ID: 700952659H1
caatggccaaagacctcgaaacggagattcaaagtgggttgcctcacaaggactaccacgccccaccccccgccccattctacgaccccgccgagctccgaaagtggtccttcttccgagccctcatcgccgagttcgtcgccaccctcctcttcctctacgtcaccatcctcaccgtcatcggctacaaccaccagacagccaccgccgccgagccctgcagcggcgtcggcgtcctcggcatcgcttgg

SEQ ID NO: 86435 - DNA, 251 bp, Glycine max
  Clone ID: 700952660H1
cagacttgggagtgaactgaaaaagcataaagtatggcttcgacggcagcgtaccttgctcggcgcgcggccagaaggagagggttcggatcctctaccgccgcgccctcaaagacactcgcaactgggccgtacatcgccacctcttctacgacgacgcttcaaacctccgcgaaaggttcgaggagaacagacacgtggaagaccctgataccattgacacgctcataacggatgctgaagcttcctac

SEQ ID NO: 86436 - DNA, 250 bp, Glycine max
  Clone ID: 700952661H1
ccttactgcttcctactgttctaaaagcaaaatcaatgacaccaacttctgctctccaatatctatgtaacttcctagaacgttcttttttgtaaaattaagtctttgcctatgttgatcttaatggagtgtgcgttagttttctcttctcctttaatatttgcctcgcttccatgttatataccttcaaattgagtgatggcaccaagagtttcgagtttagaagcagcccagaaagccataaactcaa

SEQ ID NO: 86437 - DNA, 253 bp, Glycine max
  Clone ID: 700952662H1
gagaagcattagcaaaagcaagaagaactagtctaagcagaaatggcctcttcagtgatggcatctgtggccctcaaacctgcccctttcactgttgagaagtcctcagttagaggccttccctccctctcaaggaactcctcttcattcagagttgtggccagtggtggcaagaagatcaagactgacaagccttatggaattaatggtggcatggctttgagggaaggagttgatgcatctggcaggaaag

SEQ ID NO: 86438 - DNA, 254 bp, Glycine max
  Clone ID: 700952663H1
ctccattcgaaaaccaaaacagaaaaatcatggcttcctcaatggctctgtcttcccctgtttcactctttcaactttgcatgcgtctgtttgcattctgcttgttcttctccttctccacttcctcctcggccaaactcaaccctaccaccgactcactctcactctctttccctctcacctcactccctctctccacagcaaaacctctaaatactaacccaaaactcagaaccctttcatcttcttcttca

SEQ ID NO: 86439 - DNA, 257 bp, Glycine max
  Clone ID: 700952664H1
gaagagaagaaaataaaagctaataccattcattccatttccttcattcattctctcaacaaacaaaactctctctctctctctcaatctccttctcttgcaagcaccctcccacacactgtccaacgctaaccgatcaaaaacccatctctgtctagctttatttgatccagagttggctcacattaacgtgaaaactttgcattcgcgtgagattttcctcgaccgatagcgagtgcatttcaggaatcctgggt

SEQ ID NO: 86440 - DNA, 260 bp, Glycine max
  Clone ID: 700952666H1
agtttgttgtgagctataagctagtttatcgtgaggagaatatgaagttgtttgttttctttgttgctgcagtagttttggtagcatggccatgccatggcgcaggctaccaaagggtccctctccgaatgaaaactggctatggtgagcgttcttcggaggtaaaatgcgcaagttttaggcttgctgtggaagcacacaacatccgagcctttaaaaccattcctgaagagtgcgttgaacccacataggactacatt

SEQ ID NO: 86441 - DNA, 253 bp, Glycine max
  Clone ID: 700952668H1
gagacatttagggctcgttataactcggtgaagggtgcaaaagttgtcattgataggctaactggccggaccaagggatatggctttgtaaggttttcagatgagagtgagcaagtgagggctatgactgagatgcaaggggttctttgctcaacaagacccatgaggattggacccgcctctaataaaacccccaccactcagtccaagcccaaagcttcatatcagaattctcaacctcaaggttcacaga

SEQ ID NO: 86442 - DNA, 253 bp, Glycine max
  Clone ID: 700952669H1
cacaaccaggtccctgaatgctttttagagagagaaagagtaataataataaagtggaagaaaaagaattaggagagtgaaacaagaagaagaagaagaagaagaagaagaagaagaattgagaagatggtgtttgaggaaactgagctgatgctgggactaggactatgtctccctggaaatggaaccacggcaacaactgaagctgctgctgcggaattaggagtgaggtagagacggttctctgagactg

SEQ ID NO: 86443 - DNA, 244 bp, Glycine max
  Clone ID: 700952671H1
cttcaatatttaccgccccgccggagaataagaagaaggatccgagtcacagtcactgctcatcgccatgtctcgggttgataacagaaattcctcagccaccaagcgtgctaggactgatggtagtcgtagggaagatgattggacatgccccagctgtggtaatgttaatttctctttcaggacaacttgtaacatgcgtaattgcactcaaccaaggccggctgatcatcattctaaatct

SEQ ID NO: 86444 - DNA, 252 bp, Glycine max
  Clone ID: 700952672H1
ttgatctctccctctctgttcttttctgtctgtctctttctctatctctctcttcggggagcgagatcaatcagctacagcttccccccacaaaaaccaaaaatcagataacccagataaaaacaactcccaaaaacaccaaaaaataattaacacaattacaaaaatatctagagttctgaataacaaaattccctctacgttagttgttttctttctctttcaactttttccttcccaccaaacacacac

SEQ ID NO: 86445 - DNA, 251 bp, Glycine max
  Clone ID: 700952673H1
gcgtgcttttgtgggggcaaatagtagatagtagatctgtcgcagagcaaagaatcgtcggcgacggcgaggctgcactataaccgcgattaactatgattatccttcgccggagcgtaaacaagatcccggcgaaatcgaagcgatttaaatgccgattggtgaagttcgaggagctgccggagtacttaaaggacagcgagttcatattggactattaccgctctgaatggcccgtgaaggaagccttg

SEQ ID NO: 86446 - DNA, 243 bp, Glycine max
  Clone ID: 700952674H1
caatagtcatggaaactagcaagttcagtttgctattcttttacgtaatttgtcttgctatattccctacccttaacgctaacataggtcacttcgatcatgtctggcataggcgattaaaagaagcaagagaagccgcaaaacaagcttacaagccgaaccccatgaaagttaccgctgagttcaatacacatgtcatcagggcaatgagaggctccaacaactcaagaaagggcttatcaa

SEQ ID NO: 86447 - DNA, 247 bp, Glycine max
  Clone ID: 700952675H1
aagaagagagagaaggtggatagggtgatacagattacagagtttgtgtatccatcttcgttcgtcgcttggcttgttcgccttcactctccgacattcacatcattcatcagagactggagcctgcgaagaaaagaataatttatggaggacggcgcaggaagaggtttggaatgccagaagactatggatgggaaggtgagtaacagtaatgggccagagaaggaaattccttcttgttgtctga

SEQ ID NO: 86448 - DNA, 248 bp, Glycine max
  Clone ID: 700952676H1
tgacttcaggtgtcattttttgcccgttggtatgcttagtaatgacaataggcaactcagctatcatacatggtctttggcccatacattgtatttggacatattactgtgtagtgagatctaaaaaattaggacctgcactgaagtttgttacatgcacatgtatactacccttggtgttgattttatggccagtggctggcattgttgggagtgttataggtggagctgcctatggattttttgca

SEQ ID NO: 86449 - DNA, 249 bp, Glycine max
  Clone ID: 700952678H1
caaaagtgactcagaaagtattctttgacgtcagtattggaaatccagttgggaagcttgtgggacgtattgtgattggactgtacggcgacgatgtcccccaaacggccgagaacttccgtgccctttgtactggagagaagggctttggctataagggctccaccttccatcgtgtcatcaaggatttcatgattcaaggaggagactttgacaaaggaaatggcactggaggcaaaagtatatatg

SEQ ID NO: 86450 - DNA, 252 bp, Glycine max
  Clone ID: 700952679H1
ccttcagaaagaaagaacttgctctgctctctctttgctttgctgcttctccctataatctctctgcaaacttgttcagcaagaaaccactttagaatcagcataaagttgggttatttcaagcttctgattccaggacgacaacaacaacaacaacaacaaaaagtggttccttttatttttcctcaataaaataccaaatatcttactgtatcaaatataatcacctcctgtgatttatacttttggttc

SEQ ID NO: 86451 - DNA, 248 bp, Glycine max
  Clone ID: 700952680H1
ctcggctcgctaaccccagctacttctccctcatccactcacaaaatgtgccaggccctctccgccccatcgcctccgtgtacggctcttctctccttccttttcttcctcctcacggtggtgggcccggtctcggtctcggcatggcggcgtggcccagaaaaacaatatgaacaccaccgattacgccttcggggactccaagaaatacgaggggtcctcggagttcgtgaagctgaggtaccaca

SEQ ID NO: 86452 - DNA, 258 bp, Glycine max
  Clone ID: 700952681H1
ctcgcactctcactttgggactcactgcttcgtgctattcttcttgttctttcccctcttatcggaaaactagctgcattgacgccgccggcttagattccgatggccgtgaattcaaaacccccgaggtcatgtggagggaacaggcgggtgaccctagcaagaagacccagtggtatcgcgacggcgtctcctactgggagggtgttaaggcaaatatggatggggtattgggagggtttgccaatgtgaacgagc

SEQ ID NO: 86453 - DNA, 271 bp, Glycine max
  Clone ID: 700952682H1
cgcataattagggcccatgctcggttcggtaacaaatgggtcagcatagcccgcctcctctcggtccgtaccgataacgtcatcaagaatcactggaagtcgctgtgataactactagtgtagttataatactctttctcgccgttaagaatttggaaatatcttcatttaccatggattggtgtcaaaatcaaaacggaagttttaaaagtacagatgcactatgtattgcggcagaagctgatgaggaggaacttgatttcacaaaggt

SEQ ID NO: 86454 - DNA, 215 bp, Glycine max
  Clone ID: 700952686H1
tggaggaattggaactgtgcctgtgggacgggttgagactggtgtcttgaagcctggaatggtggtgacttttgcaccaactggactgacaaccgaagttaagtctgtggaaatgcaccatgaagctctcacagaggctcttcccggtgataatgttggattcaatgttaagaatgttgctgttaaggatctcaagcgtggttatgttgcctcga

SEQ ID NO: 86455 - DNA, 240 bp, Glycine max
  Clone ID: 700952688H1
caaaagagcaaaatcttttttattgcatggtctccttcggtagcccgcattcgccctaagatgctatatgcaacatccaaggacaggttcagaagggagctgcagggcatccattatgagattcaggcaacagacccaaccgagatggatcttgaagtcctcagagagcgtgcaaactgagcacctacacaagagggttgtgtctaggtgatgtagttaagatatctgaagcctcaggga

SEQ ID NO: 86456 - DNA, 241 bp, Glycine max
  Clone ID: 700952690H1
agaaaatgaaagtccttgttttctttgttgctatagttctagcagcatggcattgccatggctcagaccatgaccatgaccatggccacacctaccaaattttccctctgagaatgaaaactggccatggtggccactacattccggagggatcatgccaaagttggaggcttggtgtggaatcacacaacgtcattgactggaacaccgttcctcaagattgcgagggatatattgggca

SEQ ID NO: 86457 - DNA, 246 bp, Glycine max
  Clone ID: 700952691H1
tacgttaccttacatatgccatttgtctctgatcttccaacaccttattcctcagagaagagacaaaatggatcaccatttcacttcagaaacctctctcattattcttctcctcatcacatccctctcgtcccttgccaccgccaccaacatcgatatcctccaccacggactcgaatccgacatcaacgaattctgcaggagaaccagcaaccccggcctctgagccgagaccatgccttccca

SEQ ID NO: 86458 - DNA, 239 bp, Glycine max
  Clone ID: 700952692H1
attttgaaggaaaactaagagaggcaaatgcattgtagtaacgagttggatatgcaagaaccgagcattgagacggataagcttagttacgaaatcttctccattctcgaaagcaagtttctcttcggctacgacgatccaaagctctggttccccaagcaaatacctcccaagccggaatctcagactccggcagctaccggcgccgttgactgcgtctccgcagtcaagaaccaacg

SEQ ID NO: 86459 - DNA, 243 bp, Glycine max
  Clone ID: 700952693H1
gtcgaaaagttcatctctccctctctctcacacatcccagccatgagcctcttcggtataggcagaaaccagagaacattccgcccgaaaaaaagtactccttctggaagtaagggagctcaacttagaaaacatattgatgccacgttgggtagtggaaatctgagggaagcagtaaagctacctcctggggaggatttaaatgagtggctagctgtcaacactgttgatttcttcaaccag

SEQ ID NO: 86460 - DNA, 248 bp, Glycine max
  Clone ID: 700952694H1
tcatcatcgaagcccgtcgcgagaagaagctgcttcgtcgcggttcccaaaatcgcgtttcccaagctccgtttcaaacccgtcgctatggctacgctcggcgctcgcatggtggccgccgcacccaccgtcactccgccggcctcgctcgacttcgaaacctccgttttcaagaaggagaagattaacctcgctggacacgacgagtacatcgtgaaaggagggagggatttgttccctctgttgca

SEQ ID NO: 86461 - DNA, 101 bp, Glycine max
  Clone ID: 700952695H1
gcatttgcaaatttttcttctacacgggatataaattccttgagccatggggaaaacggcactaagtagttaaatatacatggccatgccaattgcatatc

SEQ ID NO: 86462 - DNA, 245 bp, Glycine max
  Clone ID: 700952696H1
gtcaagctaccaaggatgctggagtcattgctggtcttaatgtgatgcgaattatcaatgagcctactgcagctgccattgcgtatggtcttgataagacggccacaagtgttggtgagaagaatgtgttgatttttgaccttggtggtgggacatttgatgtttctttactaaccattgaggagggtatcgttgaggtgaaagccacagctggtgacacccatcttggaggtgaggattttgat

SEQ ID NO: 86463 - DNA, 277 bp, Glycine max
  Clone ID: 700952701H1
ttctgaatgttgttggtaatgctgtgaagttctcaaaagagggttgcatttccatcactgctttcgttgcaaagcctgaatcctttagagatgctagaattcctgactttcttccagtgccaagtgataaccacttttatttgcgagtacaggtaaaagattcaggatcaggaattaatccacaagatatcccgaagttattcactaagtttgcacaaaaccaatcattaacaagaaatcctgctggaagtggacttggcctggcaatttgtaggag

SEQ ID NO: 86464 - DNA, 278 bp, Glycine max
  Clone ID: 700952703H1
ttttgataataggttggacagattaaagaaaaatacatataagagaaatgctacaacaactacaacagccttatctgtctaagtgaggtttgctatatggatcccatgatatatttgggcttgattaataaccaaattttcaaggatattattcaccatgagatccccttttacagtttcttccagtgtccttcgtggtttccctctatatcactttaaatgaggttaaaaatcattttatctactatccttaggggttctaatataaattagaattg

SEQ ID NO: 86465 - DNA, 278 bp, Glycine max
  Clone ID: 700952706H1
gccatggctgctctgcaatacttggaatcgctgcgcaacgcgatcctgagctctccgattggtacaattcgctggcggatctataccagaacaagctctggcaccagcttaccctcaagcttgagcagttcgtggctctcgccgtcttccaggccggtgatgcattaatacaattatatcacaatttcatcacagactttgagaccaaaatcaaccttctcaagcttgcgcatttcgctgttatagtttctcggcagtatgctgagaaagaagctgcg

SEQ ID NO: 86466 - DNA, 280 bp, Glycine max
  Clone ID: 700952708H1
tgggggttgttattattcttcataatggttgcaacagctgctacggcgtcgtttctccctgtgccttcgccggacgctggaaaagggaaacccaagggtggtggtggcggcggcgtttctgtgaacctcggaggactcaaagagaagcaaggtttgtgcggttgcttgcaggtcaaggcaaacgcacaagcccctccgaagaccatggagaaggttgagaatgatttgccatggttgccgtcgtcgtcgatttcgcacgccccgaggacttttataaatc

SEQ ID NO: 86467 - DNA, 275 bp, Glycine max
  Clone ID: 700952709H1
gtcagattgacactttcttaaactttcaagagcttgctttcgcgtttctctttctgtgtgttgacattcatctctcattcctttatctcttcctcgattttgtgttcaaggttagtgaaccttttctatttggaatcaaagtcttcaactttggctatttggagaccaaaagcaatgctgcctttgttcttctcagtggctttctctgctgttcctttgatcctctatattccaccactcagaagcttaaacctctttgtagagaccattgaaga

SEQ ID NO: 86468 - DNA, 275 bp, Glycine max
  Clone ID: 700952710H1
cattggtgggaatcggcatgaatggcgaggggagtgaagcaatgcaagtggagaaggagagcttggtgtacatgtggggttacctgcccggagctctgccgcagaggacgcctctgttgacgccgcttcttgttagggttccgccctctggttacttttggaaggatgtctgcggcggtggttgtggattcgccatggctatctctgagcctggaaagctcataacatggggttcaacagatgatttaggccaaagctatgttacatctggcaaa

SEQ ID NO: 86469 - DNA, 273 bp, Glycine max
  Clone ID: 700952711H1
cccaaaccctctcattctctctctcaccttcccagaaaaccctagaaattaattaaaaccatccaatcttcttttctccatttccccgattttgttttttcatttctatttcaatcgcaacctcctcctccttccaagtcaacgcggatttcagaattctcgatccatgtcgtccgagatcgaggttgtcgaggaggtgcagtcccgcgacgagcaatcgggggcggaggagagcctccgtaatgacgtgtacacggcggcggcttacgggga

SEQ ID NO: 86470 - DNA, 273 bp, Glycine max
  Clone ID: 700952712H1
cacaaactcagggtagggcagagagagagagagagagagagagagagagagagaatgggagggtgcgctatcgcggtgcatggtggcgctggtgtcgaccctaatctcccactcgagcgccaagaagaagcgaaacaacttctcacgcgctgtctcaatcttggaatctctgctctaaattctaatcttcccgacatagatgtcgtcgaacttgtggtgagggaattggaaacggatccgctgttcaattcgggccgtggatctgccctgaca

SEQ ID NO: 86471 - DNA, 272 bp, Glycine max
  Clone ID: 700952713H1
cgcagtgttagggtttctgtagcctccaaccagaaagagagggaaatggctcccaaacatcctagtacgggtttgtttgttggattgaacaagggtcacgttgtcaccaagaaggagttgcctccacgcccttcagatcgtaaggggaaaacaagcaagcgagtgcactttgtgaggaacctcattcgagaggttgccggctttgcaccttatgaaaagcgaataactgagttgctcaaggttggaaaagataagagggcactgaaagttgc

SEQ ID NO: 86472 - DNA, 275 bp, Glycine max
  Clone ID: 700952717H1
aagtgacaagaccattgacggaagaggagttgatgtctaccttgctggtggggctggtattaccatccagttcatcaagaatgtgatcatccatggagtcaagatttttgacattcaggttggtaatggtggacttattatagattctgagaaccactatggtttgaggactatgagtgatggagatggcatttccatctttggctctagcaatatttggattgaccatgtttccatgagaaaatgcaaagatggattgatagatgctattcagg

SEQ ID NO: 86473 - DNA, 275 bp, Glycine max
  Clone ID: 700952719H1
gtggatggagagcacgtatcaagcccaatgttgtggttgccaaggatggctctggtcagttcaataccgttgctcaggctattgcttcataccctaagaataaccagggtaggtacattatctacgttaaggccggtgtctatgacgagtacatcaccgttcccaagactgcagtcaacattctcatgtacggtgatggccctgctaagaccatcatcaccggtcgcaagaactacgtcgaaggtgtcaagaccatgcaaactgccactttcgcc

SEQ ID NO: 86474 - DNA, 275 bp, Glycine max
  Clone ID: 700952720H1
ttgggcgctgatgtggacttcacctatgcttctcacagaggctgttgatgaatacaaggaggccgaggcgcttggactggataccgttccgggcctcgttggccctgttacatagctgttgctctccaagcctgccaagggagttgagaaatccttttctctcctctctctccttcgcaaggttcttgctgtctacaaggaagttattgctgaccttaaggcagctggtgcttcatggattcagtttgatgagcctgaccttgtcttggaccttg

SEQ ID NO: 86475 - DNA, 272 bp, Glycine max
  Clone ID: 700952721H1
ctcttgtctttctctctctcccgaagataaggcagagaagagaaggagagaggcttgtacctggagagaaaagaggagacaataatacatggggaagcagggtctaaacacggtggagcaacaatctgtggcaccgacagcatccaagtttccgttgagcttttgggaagccacggtggcttcaacggtggcgctggtttttgcggtgggtcttctcggcgtgtacctcaccatgcccgattccgattacagcttccttaaactccctcgta

SEQ ID NO: 86476 - DNA, 276 bp, Glycine max
  Clone ID: 700952722H1
gattggtcccattgattccgaagagaaaagaaaagatgtttgagccacaacagctatacactcgcgcgaagaccgaggaattcgacctcgaatcaggagaaaccctctacccagggctgagcgtcggcgagaaccagctccgatggggtttcatccgcaaggtctacggcatcctctccgcgcagatcgtcctcaccaccctcgtctccgtcaccaccgttttctatactccaatcaatgacctcctcaagggcaattccaccctcctcctcatcc

SEQ ID NO: 86477 - DNA, 275 bp, Glycine max
  Clone ID: 700952724H1
cactcatcgattccgtgttctccgaggcccttgaaagatcggttcgtgcttcggtcttctaaagtggagcaaatatcgtttacggaatctgagaactcactcatcgaagcccttcttggcatccaaggacgcggacgttcttcttctcgtcagcagctcaatgctgttgagcgtgctgttcaagtcctggagcggttagggggtgtacctgatccgacaaaatcaaacttgatcgagggtcgctggcagctaattttcaccacaagaccaggaac

SEQ ID NO: 86478 - DNA, 273 bp, Glycine max
  Clone ID: 700952725H1
gtgagcagccgagatctgttgccggtggcatcaaggaaagtaagagtttagagtttgaactctgtttatccaatgcacaaagcgtagatctctgtgttataatggaatacaggaaaatcaaagacgaggatgaagttagggatgcgggcgttgaggacgttggaaaatcatttttgctgtcagtcccagataacgatttgacttccgagggagaaaccaaaattgacagccacagggagaaagtaaagtggaagcgcaagtcagttgttacac

SEQ ID NO: 86479 - DNA, 272 bp, Glycine max
  Clone ID: 700952726H1
atgtgaactaaatttttaaccagcttctttggcaggcttgcatttacatcatacaacaaacgtaatcaattctattctgttacttttattctcttaaaacacacctttctttgaagctacttgatggagtttttctgttgaatttatagaacatactttgtgtcgaagctataaaacagcaggtttcacagttttacctaagatcatccaacagtcatcatggttaaacataacctccactaaaccatagggatattatagaatttctgcca

SEQ ID NO: 86480 - DNA, 273 bp, Glycine max
  Clone ID: 700952727H1
aattcactctctattttgttgttaatcgaatttctctctcctttctttctctcttctcttgacgttgaaaatattacgagagagaaacgcaaggagagagaggaaaaccaaaaaatggttgtttccaaggtggttgtttttcttggtctgattctcgccgcccttatgtcagtggcttgctcccaatccgctgctccggctcctgctcctgctcccacaagcgatggcacctcaattgaccaagctgtagcgtatgttctaatgttggttgcc

SEQ ID NO: 86481 - DNA, 271 bp, Glycine max
  Clone ID: 700952728H1
ctaatcaggaatggggacattgatgttgcatttggtaaattgcgtgaatggtatccacagattgttgaggacaatatatcagctacatgctttctgcttcattgtcaaaagtttatcgaattagttcgggttggagcacttgaagaggctgtcaaatatggaagaatagaattgtcaagtttttatgacttgcctgtctttaaggatttagttcaggactgtgttgctttgctggcatatgaacggcctctggaatcctccgtaggttatc

SEQ ID NO: 86482 - DNA, 271 bp, Glycine max
  Clone ID: 700952729H1
gagaaagggaagaggagagagagacgaagaagaagagtgtttctcacatcacatggcctccttgcccttggggcaccaccaccaccaccacaaaccggcggcggcggctatacatccgtcgcaaccgccgcagtctcagccgcaacccgaagttcctcgccggagctccgatgtggagaccgataaggatatgtcagctactgtcattgaggggaatgatgctgtcactggccacataatctccaccacaattggaggccaaaatggggaa

SEQ ID NO: 86483 - DNA, 270 bp, Glycine max
  Clone ID: 700952730H1
gggagaccaaatgctgattctgaaaatcctgtcttgaaagaagagcaagatgcccaagttggtaaggggtcacgaggtgatgttaccatattgcctactctagttgtcaataatagacagtatcgaggaaaattggagaaaggtgctgttatgaaagctatctgtgctggttttgaagaaactactgaaccagctgtttgtttgagcagtgatgtggagacaaatgagtgtttggagaataatggtggttgttggcaggataaagtagct

SEQ ID NO: 86484 - DNA, 270 bp, Glycine max
  Clone ID: 700952731H1
gcagcattgggagatagaaagagagagagaaagagagagagagaaagacccttacccttctctatcgctcgctttcctttgacgcttctgacccttgctttgtctgcgtcttccttctttctttctttctttctctgtgtgtcgtaatggctctcccagactcttcttcccgtcgcaactccctgatcccctccttcatctactcctcttcctccaaaacgctccctctccaccacatgctcaacaccgcctccgctgccgccgccgccg

SEQ ID NO: 86485 - DNA, 272 bp, Glycine max
  Clone ID: 700952732H1
acaatgttctgggctttggctttggtaagcctctgtggccagctaccttccaatgcccaagcacctgcaactgcgccggcaaactcaccacctacaaccccagctgcaacatcaccatcttccggcacgccactggcggtaacactaccaccaacagtggtggcatcccctcccaccacaagtacaccaccaactacatcccagccacctgcaattgtagctcccaaacccgcacctgtgacaccaccagctccaaaagttgcacctgcttc

SEQ ID NO: 86486 - DNA, 273 bp, Glycine max
  Clone ID: 700952733H1
ctggctcagaaggaacgctagctatatgcttaacacatgcaagtcgaacgttgttttcggggagctgggcagaaggaaaagaggctcctagcgtgaaggttgcttgtctcgcccaggaggtgggaacagttgaaaacaaagtggcgaacgggtgcgtaatgcgtgggaatctgccgaacagttcgggccaaatcctgaagaaagctaaaaagcgctgtttgatgagcctgcgtagtattaggtagttggtcaggtaaaggctgaccaagccaa

SEQ ID NO: 86487 - DNA, 272 bp, Glycine max
  Clone ID: 700952734H1
acgagatggagcaaataaagcacagaacagttgaagtgaatggcataaaaatgcatgttgcagagaaaggagagggtccagtggtgttgttcctccacggcttccctgagctctggtactcatggcgccatcagattctctctctcagctccctcggctaccgcgccgtcgctcccgatctccgtggctacggtgacaccgaagcaccaccttcaatcagcagctacaactgcttccacatagtgggtgatctcgttgcgcttattgactct

SEQ ID NO: 86488 - DNA, 279 bp, Glycine max
  Clone ID: 700952737H1
cgagtgaaggtgggaatccacgaccatgcagacaaaacgcacctacatgatccagatgggacgagaccaccatgccctcgaacgttcaccgaccacctcagctggttcgacgcctccctcaaatcagcgtccccctccgcggagattctctacacttacaaacacgtggcccatggcttctccgccagactcagtcccaaggacgtagacacacttgcaaaacaacccggcatcctctccgtcatccccgaactcaaatacaaactccacaccacaagg

SEQ ID NO: 86489 - DNA, 273 bp, Glycine max
  Clone ID: 700952738H1
tctctctctacaaaacttagctctgtttttaattattccttgcattctcttgtattaagatggaagcaactaccatcaccaatgggagccaaaacggttcgttttgcttgtccactactaagggaagtagtgatccgttaaactggggagcggcggcagatgcgatgaaggggagccacctggacgaggtgaagcgcatggtggccgagtaccgcaagccggtcgtccggctcggcggagagacgctcaccatcgctcaggtagccgccgtag

SEQ ID NO: 86490 - DNA, 279 bp, Glycine max
  Clone ID: 700952741H1
tccgagcaacacggatggtaagatgaacataaccgtgaatcctgattacgtggcacccaaggaactctacagaacagcgcgtaacatgggcacaaacgccactctgaacaaaatcagcaacctgacttgggagttcccggttgattctggcttcacttacgttctcaggctccacttttgcgagcttgaccccaatattaataaagatggtgacagggtgttcttcatttacatagcgagccagttggctgagaaccacgctgatgttatgcaatggag

SEQ ID NO: 86491 - DNA, 270 bp, Glycine max
  Clone ID: 700952743H1
ttggtttgtttggggtcctgtggctgcacatatccaaccttaacttcggccgtcgaatctttctggtcattggttgtgtttaattctttcaaaaattcaaacacaacccaaaatctcttgggaattgctagattcactgcttctcctagcagcagattttgggttcttctgacccaattattcattttccccaacttggtcttgttgaatttttattggggttgtaaattccttgttgttgagtttgaaagttatttcctttttcccctt

SEQ ID NO: 86492 - DNA, 271 bp, Glycine max
  Clone ID: 700952746H1
aaaggaccaaccatgtcgcctagtttcgtcttcgacccgcctagcgacgaagaaatcgaacactctgaacacgaagaagaagaagaatccgaagaagaaccagagtcaggatcaggaacaggatcagaatcagagtcagaaggagaaggagaagaagaagaagggcacgaagaagcgcgggttccgaagaagaagaagaagaaaacgcagtctccatgggactttgctaaatacacggaatcagtggcggaggaacacgctcgcaggagca

SEQ ID NO: 86493 - DNA, 270 bp, Glycine max
  Clone ID: 700952747H1
ctcaccgattgctagaatggaatttcgatgctcagtcatctcttttaccattctcttctctcttgctcttgcaggagagagccatgtccatgcatcgctacctgaggaagattattgggaagctgtttggccaaacactcccattcccactgcactgcgagagcttctaaagcctctccctgcacgtgttgaaatcgatgaactccctaagcaaattgatgatacacagtacccaaaaacattcttctataaagaagaccttcatccagg

SEQ ID NO: 86494 - DNA, 269 bp, Glycine max
  Clone ID: 700952749H1
cctctttctaaacaatagtatcttttcgcttcaaatttcatttagatccaaaatttctgaatcagtgaagaatcttagattctgtgggaaaagcttctcaatctttgacgaagataaacaacaatgtcttcacttgcggctgctagagcagacaacttttactatcccccagaatgggaaccgaatcagggttcgctgaacaagtttcatggtcaacatgccttgcgagagagggcgagaaaattagatcagggtatcctgattataag

SEQ ID NO: 86495 - DNA, 271 bp, Glycine max
  Clone ID: 700952750H1
gcccaaatcgcttatcgctcttcaacacccaaacgcttcttctttctcgccccatccccgtccatgcgattcaagaatgacattgcctgtaatgaagtttagtggtcaaatttcttatagcaggacttttgatgctgtagagaaagctgcaacaaagctcttacaaattctccaagaaaaaacgaccgacatgatgcaaactgcaattggatttgacattgagtggaaacccaccttcagaaaaggtgttcctcccggaaaggtagcagtg

SEQ ID NO: 86496 - DNA, 270 bp, Glycine max
  Clone ID: 700952751H1
ctcacctcccaactcgccctcgactcacatccttgtccgattccgcgaacgagtcgagtgaatcgggttggtaagatctattctgtttcttcgtcatggcaaccggacaactattctcgcgtactacacaggctttgttttacaactacaagcaacttcccatccagcggatgcttgattttgacttcctttgcggcagggaaacaccatcagttgctggaataattaaccctggttctgagggatttcaaaaacttttttttggtcagg

SEQ ID NO: 86497 - DNA, 271 bp, Glycine max
  Clone ID: 700952752H1
ggtttctatgcatttgaatcagaggatgacgtagatccttcgattagatatgttggaaccaattaccctcatgttaagcggcgtaagaacttgcctgaccctgtagaaaaagagaaaggtgtcagtctttggtcaatgattaaggataatatagggaaggatctaacaaaagtttgccttcctgtttattttaacgaacctctttcctccctgcaaaaatgttttgaagaaatggagtattcatatcttctggaccaagcatatgaatggg

SEQ ID NO: 86498 - DNA, 273 bp, Glycine max
  Clone ID: 700952754H1
ctatgccacacatggaagtggacaaatggattcagctgccacaccagaaaactcatcaatatcaattggagatgatgattttgagcagagttcccaaaagtgtaaatcaggaggggatgaatatgatgaagatgaacctgatgccaaaagatggaaaattgaaggtgaaaatgagggtatgtcagcccctggaagtagaacagtgagagaacctagagttgtagttcagacaaccagtgacattgatatccttgatgatggctataggtggag

SEQ ID NO: 86499 - DNA, 267 bp, Glycine max
  Clone ID: 700952755H1
cttaggtttgtcccacaagtagtgatgctaagcctatgtttgacatgaatttcatactacttatctatatggcactctcagttgctggttcattttgtgttttgctgcgagccatgatggtgttaaatgctggactttggacagcacagacacttttcacaaagatgttgcatagtgtgctccgtgcccccatggcatgttttgattctacaccaactggaagaatattgaacagggcttccacagatcaaagtgtgctagacttgg

SEQ ID NO: 86500 - DNA, 270 bp, Glycine max
  Clone ID: 700952757H1
ccatttctcttctcgcgtctcactctcccaccgattcagtttcggacactcactcccactcgctccgattaccgcaccattctgcgtcgccatttagggtttcttcgctcctctttgttggatcttcctcactttgcatcgttctcttcgattcgtaaaatttttcttgcttctcctgtcttggctcgagatccgggccaagcacagaagaatccgtttctgatttgcattttgtactcactggtttggcttgtttttgtctctttgtag

SEQ ID NO: 86501 - DNA, 271 bp, Glycine max
  Clone ID: 700952759H1
aaaatcgaatcccattttaattctcagatccaagcttgggagacagagaaagagaaagagaatggacgccattgattctgtgttcgatccgctgagagaattcgcaaaggacagcggtgaggctcgtgaagcgctgccacaaacccgatcgcaaagaaattcctccaaggttgccgtccgtattgcaattggttcgtcgtgaatggaatccgccggttcctccgtgagctcaatttcaatcccattaaccacatcattgtcggatctgggt

SEQ ID NO: 86502 - DNA, 266 bp, Glycine max
  Clone ID: 700952760H1
atttttcagtttctcagtttcttattcgttagatctcatcttacactcaccgtcaagttcgtctcgcgccaccgtcgacgcagttccggccactgcctttggttccctcactttctgtctcttcttcttcttctcagaaatatgccttctcagaaggttgaaacgggtcatcaagacacagtccatgatgttgcgatggattattatggtaagaggctggccacggcttcatcagatcacacgattaagataattggggtgagcaa

SEQ ID NO: 86503 - DNA, 251 bp, Glycine max; identical to SEQ ID NO: 86330
  Clone ID: 700952116H1

SEQ ID NO: 86504 - DNA, 264 bp, Glycine max
  Clone ID: 700952117H1
ctgagcttcgggggaagagatccagcagcaatggtgtacgtcaaggctcagaaatcaaaagcctacttcaagagatatcaagtcaagttcaagagaagaagagagggaaaaaccgattaccgtgccaggattcggttgattaatcaggacaagaacaaatataacactccgaaataccgatttgtggttcgctttagcaacaaggacattgttgcacaggtaatatctgcgagcattgccggcgatttagttcttgctacagca

SEQ ID NO: 86505 - DNA, 260 bp, Glycine max
  Clone ID: 700952118H1
gctagaaataagggtatgaaagcttcggagcaggattactttgaacagctttcaagctcattcaggtgcttagtggatttgatcccagctgaaaaatgtaagtttgatggggtgaacgacaaagtggtagtggatgcagctaatggggttggtggagtgaaacttaaatatttagggaaattgttgaatggtttgattattgaggttcggaacagcagtgaagatggaggtgtactgaatgatggagttggtgctgatta

SEQ ID NO: 86506 - DNA, 258 bp, Glycine max
  Clone ID: 700952120H1
gtgcttcaccgccttcaccacctctaccgccaccacgtccggcgccggaggtgcggacatagcttctccggctaccagatccggcatctccgcgcgtccactgaagagatcttttcccgaggaactctcgccgccggcggatcctccgtcttcagaccagacgaccccgtcggaggcgaacgcgctggtgaaccgctgctccggctgcaggagtaatgtcggactcaccggatttcggtgcagatgcggcgagctctt

SEQ ID NO: 86507 - DNA, 257 bp, Glycine max
  Clone ID: 700952121H1
ctcgagcgaatcggctcaggcgacacgtatcttcatcaaaaatcgcagaagcagattccggtgcatctcatcgacttccaaaatgaacgacgcagatgtctcgaagcaaatccagcagatggtgcgtttcatccgccaggaagctgaggagaaagccaacgagatctctgtatctgccgaagaggaattcaatatcgagaagctgcagttggttgaagccgaaaagaagaagatcaggcaagaatacgaacgcaaag

SEQ ID NO: 86508 - DNA, 253 bp, Glycine max
  Clone ID: 700952122H1
ctccacccgagatccccaaggctgtagagtttgagaagataccctcaccagcttcatcaagtggtggtgaaaaggctgttaaccatatgtcaatagctaatcagaaaggttctgataattatctggagtttgatttcttctagagagagggtagagacaatatattgattgcaaatggtttctgttaagagggggaggaactgtttttcaatgtttcaggaacagatatgatgaggaattgtatgtttgtttt

SEQ ID NO: 86509 - DNA, 254 bp, Glycine max
  Clone ID: 700952124H1
ccaaatcccaactactactcacactcactgcagatctcaatccatggctaccattgttagcatcaaggcccgccagatctttgacagtcgtggcaatccaaccgtcgaggtggatttgacatgctccgatggtacttttgctagagctgctgttccaagtggtgcatccactgggatttatgaggcccttgaattgagagatggaggatctgactaccttggaaagggtgtatcaaaggctgttgacaatgtga

SEQ ID NO: 86510 - DNA, 251 bp, Glycine max
  Clone ID: 700952126H1
ctccgattccgcatttctctgcttccactgcgacgccgccgtccacgccgccaacttcctcgtagctcgccacctccgccgcctcctctgctccaaatgcaaccgtttcgccgcaattcacatctccggtgctatatcccgccacctctcctccacctgcacctcttgctccctggagattccttccgccgactccgattctctcccttcctcttctacctgcgtctccagttccgagtcttgctctacga

SEQ ID NO: 86511 - DNA, 253 bp, Glycine max
  Clone ID: 700952128H1
tcttgagctagatgatctaaagattatagaaagcaaaccaacattactagctagtggagtatttaattatacttcacatgctcccttataatttttggaaattgatatataccagagccgtaagatttttcccatctttctcgtgatatagttcttctggctcacaagccaataaaggcaaccacaaccttcaacttcaacagcacttgatcacattcactgtctagtgatccaccttcacttcccgtttcca

SEQ ID NO: 86512 - DNA, 247 bp, Glycine max
  Clone ID: 700952129H1
ctctacctgagaaggaggatccctgtgctagctcgatcaaagatcaaagatggaggagcggactcgcagcattctgattttgatgaccttgctttccatctccattgctggcggcaatgcaggtggcttgcagcatcataagggtaggcatggtaagcatggtcgtcatatgtctgctcgtaatgtgacttacgacggtaagtcactgttcattaacggaaggcgcgagatccttttttccggctcc

SEQ ID NO: 86513 - DNA, 247 bp, Glycine max
  Clone ID: 700952130H1
ggctcgagggccattgagagatagccccgatgaaatgatggcagccttataccttcaagtcagcataattagccaggctctaatcttcgtcacaaggtcccgcagctggtcttttgttgaaagacctggtcttctcctactaggtgcattttttattgctcagttggtggcaacttttatagcagtgtatgctaactggggctttgcaagaataaagggaatgggatggggttgggctggtgtaatc

SEQ ID NO: 86514 - DNA, 250 bp, Glycine max
  Clone ID: 700952131H1
tagaggcagaggtttttcttctctcaccgtagaatcgaatcgagttcactttgatcgtgtgtgtctccgatcttcaaatccgcaacaaccatggtgaggggattgctcaacaagctcgtctctcgctccctctccgtcgccggaaaatggcagcacaaccaactccgccgcctcaacatccacgagtaccagggcgctgaattgatgagcaaacacggagttaatgttccgagaggcgtggctgtttcct

SEQ ID NO: 86515 - DNA, 251 bp, Glycine max
  Clone ID: 700952132H1
ccactcaagtgttgtaggctcttcgtggtttgcttttgggcccggcccgatacggcttgtttttattatgtatctcacttattcactttgctgtttttattccgtaggctgaagttcaggagaaaactttatatatggaataataacaataattgtacatagaaaaagataatggtcgcatctgtatgtatgtatcataatggctttgaatctgaattatccaaaaaaaaaaagataaagaaaaaaaggga

SEQ ID NO: 86516 - DNA, 206 bp, Glycine max
  Clone ID: 700952133H1
aggagagggagggagagattcgaattccaattagggttttctcatcatcatcgactttttctcttatgcaaggaaggttctccttctccgatttcaatttgattgaacgagtagtgttaagattatgatatggtttgagaagcttcgtttctctcctcacctaagctgattcattgccggcagcagctggtcaagaaggtgcgagg

SEQ ID NO: 86517 - DNA, 261 bp, Glycine max
  Clone ID: 700952134H1
agctcaccagcttcatccactgcttttttggtttctctccctttggtggtgccttcccctttgaggaggagagagttgcaaagtttgttttaagattcattcttgctttttcagcttccatataatttccctctttttccattgggggggctcctattccttttttgtgcttagtttttttttattacttttcaaaattttctttgctgctcagaatcagggaaaaggtggatttttgatttttaaaaaaaagttttgttt

SEQ ID NO: 86518 - DNA, 253 bp, Glycine max
  Clone ID: 700952135H1
taaaaagagaacagttgaggaagaagggaagcttctcccggagtttgaagatgctgatgaaagagaactctttgaagcgctgatgcttgagctggatagtgatatggatgttgatatattgcgccactatgaggttatgtacttaattcatgagaagcatgaagaggaggttgtagctgtcaatgagaaaattcaagactttttgagggagaagaaaggtcaggtttggagattgaatgattcgggtatgaga

SEQ ID NO: 86519 - DNA, 257 bp, Glycine max
  Clone ID: 700952136H1
gtttgttgatcgagataactagaaacagtgtgatgaaaatgaaggtccttgttttcttcgttgctacaattttggtagcatggcaatgccatgcgtacgatatgttccctctccgaatgaacactggctatggtgcccgtactccggaggtgaaatgcgcaagttggaggcttgctgtggaagcacacaacatctttggctttgagaccattcctgaagagtgcgttgaagcaacaaaggaatacatccatggcgaa

SEQ ID NO: 86520 - DNA, 256 bp, Glycine max
  Clone ID: 700952138H1
ctcacacagcacgagggccaatcaatggaaagccgtgtccacctcccttgctctaacgacgtcgtcgtccacgtcaacggcgactctgctcccgacgctcgccggtttcacccaaccaacgatgacatttccccctcaacaacaacaacaacagcatcaggagcatgggaaggaaagaaggggcagtttggttcttgcgtacaagactcttggagtggtgtttggaggacttgtgacatcaccccttcacgtgaac

SEQ ID NO: 86521 - DNA, 253 bp, Glycine max
  Clone ID: 700952140H1
ttttacttcccctatggctcgtcactccttgctcttagccctcctcctcttcgccgccgtggccaccgccgcgatggcggtgccgcgtccgacgccgacgacatcctgatccgtcaggtggtgccagatgttggcgaagccgaagaggaggacaacctgctgaacgccgagcaccacttcgcgagcttcacggccaagttcgccaagacctacgccaccaaggaggagcacgatcatcgcttcggcgtcttca

SEQ ID NO: 86522 - DNA, 250 bp, Glycine max
  Clone ID: 700952141H1
atttcttcctctttccatttcacctctctctctcttcttttttcccttctacactgagactccctcgccccactgggtgctgacgtgggcgcaccctcgccgcttctcgttccatggaggccacggctgccgttgccactgccgccgccgtgcgcggtgcctcgctccagatgccgcctccttcgcgcaaagagtggcgcgctgtcgccgagcaccatcattctgcccgaaaccccgacgacgaggagtt

SEQ ID NO: 86523 - DNA, 169 bp, Glycine max
  Clone ID: 700952142H1
cattttccttcttcagcgctgattcatttataaacttgaacagagatctcatctcacttctcagagattctcaccagtgattggtgatggctcagccgcttgtgaatagagacgatgactgcgacgacgaagatgactattcccactttcttggaattgataaggggcc

SEQ ID NO: 86524 - DNA, 246 bp, Glycine max
  Clone ID: 700952143H1
actgaattaaaatctgttccaattcattcaattgatcttcagttgtttcgagttgagtccattcttctcggggagaaaattgtgaccgaaacctctctggttcaaacaacacagatagcagatggagatgtgtgccgcaatatgacgctgcctatttatgtaatagtaccgcgccttttgacctgtccaacaactttagctggtcccttctcagttgagttcaaagttgccattgttataagcttc

SEQ ID NO: 86525 - DNA, 247 bp, Glycine max
  Clone ID: 700952144H1
ctcgagccgctcgagccgattcggctcgagtggaaaacactaagaagcttatagaagacactcaaaactagcttagaaaagatagaaaaagatgcgcttcaagcaaaagaagaggctgaacgtgtgattctcaaaattgaagagatggagcaggacattgtaagtgaagctagtattgaagccaaggcacaacttgaggctgaaaaagccatgcttacagaagcgctttcggagtctgaattcgtta

SEQ ID NO: 86526 - DNA, 246 bp, Glycine max
  Clone ID: 700952145H1
cggttcctccaccgtggactcagccacttccaagcccgcccatcccccagcaaagtcagtccgcatcgcgcggcttggtgccaatggaaaaggcggcggcgggccagtcttcttgggggaggtgttcagcttgtgcgacctctccggaacggggctcattgccgcttccaagcacttcggcattcccttcatttcggaaagaacccctgagtggctgaaaaaaatatttgcaccgatcaccaagag

SEQ ID NO: 86527 - DNA, 246 bp, Glycine max
  Clone ID: 700952146H1
agacaatcccatattctcttgtctatttgattgcccttgtgttccctttacaatttaaatttcttttacttgttttaatcattttccattcacaacacatatcatcatcaacatgcctgaggctcctggagactccaccaaagactatgttcttgaagagaagaacaagaaaattttggacttcatagaggatgtgaccaacaacgcagatgaagtccagaagaaggttctctctgaaatcctgtc

SEQ ID NO: 86528 - DNA, 245 bp, Glycine max
  Clone ID: 700952147H1
ctgcaattcactctgtacaattcttcgttcgttctctgcagttatatcctttttgagcttcaatggcggacgctgaaaccttcgctttccaggctgagatcaaccagcttctaagtctcatcatcaacacattctacagcaacaaggagattttcttgcgtgaactcatcagcaatgcttctgatgctttggataagattcgattcgagagcttaaccgacaagagcaagctcgatgctcagcca

SEQ ID NO: 86529 - DNA, 250 bp, Glycine max
  Clone ID: 700952148H1
ggcagaggttgggaaggccccacggccgggccagggcggttacgaagcgcacggcctgagcgaggaggaggctcgtgtacgcgccatcgcggagatcgtgagttccatggtggacctctcccacaaaggccagaacgtggacctgaacgcgctcaagtccgcggcgtgccgcaagtaccggctctcacgcgcgccgaagctcgtggagatgatcgctgcgctccccgacgccgagcgcgagacgctcctc

SEQ ID NO: 86530 - DNA, 258 bp, Glycine max
  Clone ID: 700952149H1
agagacctcaacatcttttgtggttcagcttggaagaaatgaagctgataacaaagatgcttgtatgagatattgggactttgagaaatggatgcgaaaggaatgtctaaatttctcagtactttctgcaatgaagtttgggaagaagtggtgccaccaactgcagtccatatgtgatttgtgccttcatgcctatttctctgggggagctccatgctcttcctgctgtagaaccttcagtgcttgtaagagcaaccc

SEQ ID NO: 86531 - DNA, 257 bp, Glycine max
  Clone ID: 700952150H1
aaaaaatgaaatgaatcatttcatattgatagtattgctatgcttagtgtgcgactcgttagttttttagaacggttccaatttaacaaatttataaaccggttcatcgtataaatgaattaaaaaagaactaataaccaacgcatcgcttcggattatctagatctaaagaactagtcaaaacaaaaaaaaatataaaaaaagatatattatagcaactgaactattgtgaagcataaaagaacaaaaatcttatt

SEQ ID NO: 86532 - DNA, 256 bp, Glycine max
  Clone ID: 700952151H1
ccagactgagaggaagagagagggagattctttgtttgctaccttctctcggaaaaatggttacgttcaggtttcaccagtaccaggtggttgggagggctcttcccacggaagcagatcagcaccccaagatctaccgaatgaagctctgggccaccaacgaggttcgcgccaagtccaagttctggtattttctgaggaaactgaaaaaggtgaagaagagcaatggccaagtgcttgccatcaacgagatttt

SEQ ID NO: 86533 - DNA, 253 bp, Glycine max
  Clone ID: 700952152H1
aaagaaggcgtcttcataaacgcctttcttctccgtttccgtttcctcgttcgaattcgctttttgatctgcgaaaatgagagagtgcatctcgatccacattggtcaggctggtatccaggtcggaaatgcttgctgggagctctactgcctcgagcacggcatcgggcccgatgggcaaatgccaagtgacaagacagttggcggtggtgatgatgctttcaatactttcttcagcgagactggtgctgga

SEQ ID NO: 86534 - DNA, 252 bp, Glycine max
  Clone ID: 700952154H1
ggagaaaggagagctgtcatcacatggacttgtctttctcttactctgacggggtccttccttttcttcttctccttcatattttctctctcaccattctcttcttcttctccctttcttagattctccctcttttctctctgccctccgccatgactgaggataaggagatgtcttcctctgtcaccaatggcgatgattccctcactggtcacatcatatctacaactattggaggcaaaaatggggaac

SEQ ID NO: 86535 - DNA, 246 bp, Glycine max
  Clone ID: 700952155H1
gccagatagctggaagctagcagagatatttactactggagttgtgcttggaagttacttggcaatgatgacagttatattcttttgggcggcatacaaaacaaactttttcccgcgagtgtttggagtcccaagtcttgaaaaaactgctcatgatgattaccggaaacttgcctctgcaatctatcttcaagtgagcactattagtcaggctcttatatttgtaactcgatctcgaggttggtc

SEQ ID NO: 86536 - DNA, 247 bp, Glycine max
  Clone ID: 700952157H1
ccagagtagagtagtgcggaagaaaagaaaaacgaaatccctcgctttgagaaatgggtgtattactcttccggtgggttctgccactgactctgttgctcacttgcgcgttaggtttccaatcggacgagcttctcctcgacgaccaagagttacggcatcgagggaggacgagcctccttcgattccgattcgcacccatctcccacctccaccttgaggaagagcttttctgactcctcctccg

SEQ ID NO: 86537 - DNA, 147 bp, Glycine max
  Clone ID: 700952158H1
ataaacctacttctacttcacccctttgctctcaaaccttatcacctaatccttatcctcccaaaccagaaaaccatgtctacctccgcagcttccctcgcactcccaaccctcactctccgaacccgacaacctctatgttctccc

SEQ ID NO: 86538 - DNA, 245 bp, Glycine max
  Clone ID: 700952159H1
tccccactaggtttcccaagaagcccattggagaggtggtgaattgtgctctacactcccccccagtgacccattttccaaaccaacccttcacaaaaacactccaaattaccaaagaacctacctacccccccgcggaaaggcctcagtggaacccattccaaaaagccgccgccaaggccctcgacatgttcgagagcgcgttgctctcacgcgagctcagccaacccctccccaaaaccact

SEQ ID NO: 86539 - DNA, 243 bp, Glycine max
  Clone ID: 700952160H1
acaaaacaacgatggcaagccaattatataccttagtggacaaggattcttaccttcacgccctgttgctaatgagattggggatatcctcaagagtcattatactgatccctggtcatcatggaagaagataccaattatcacaagagacttgtggctcggagagtttttgagaaagttttctatttgtccaccggattacaattgggcaaaaaagaattttgaaatacaaggtgcagcaat

SEQ ID NO: 86540 - DNA, 242 bp, Glycine max
  Clone ID: 700952162H1
ctcgagccgctcgagccgctctctctctgtctctgcgatggagtttcgcgtttccgtcatttggagccttctcctcattgtctctttattctctcctgaaatcaagggtgaggcttctggttccgtcttcttcgtcgatagctccagtaatcaattccttcgcgctagatcatccaacgatgagcaaccttcaatgttgcttcaagaagttggtgctgctgtgtcagtcttgcttggttttg

SEQ ID NO: 86541 - DNA, 249 bp, Glycine max
  Clone ID: 700952163H1
tagaggcatagggtcctcatctctgcggccatcgcggtggcctccgccgaccacgctcacgagttgaagcgccggagagatggaatcgttgagcgcctttacgcggccagttcaccgccgccgctgtgtcggaactgcgacgccggcgacgggggagaaatcaggacgcagagcagtccctccgcggaggaggaaaaggatccctacggaggcttgttcgacgacgagcaacggaagattctcgacatt

SEQ ID NO: 86542 - DNA, 248 bp, Glycine max
  Clone ID: 700952164H1
tgaagagctctttactcaaccgtatgaaaaggttaattggaagaaagcacgtaaccaatgtgcaaaggaagatcgttatcatcctcattctttgatacaagacctggtatgggatagtttatacatatttattgagccactacttactcggtggcctttcaacaagctagtaagagaaaaggcccttcaggtaacaatgaagcatatcctttacgaagatgaaaatagtcgatacataaccattgggt

SEQ ID NO: 86543 - DNA, 256 bp, Glycine max
  Clone ID: 700952165H1
ctcgagccgttcagataactgatagttgtgtgcaattatttgaattcaagaatgtctcaacccgactcgttggtggctgagattgaggtgaaaacctctgctgatcacttttacgacaccttgaagggtaagaaacagcatcgtattcatgatgttgcccctcatcatatccataaggtggaagttcatgaaggtgagtgggataaatctggcaatatcaaggtgcttacattcgctgatggggacactgttgaga

SEQ ID NO: 86544 - DNA, 112 bp, Glycine max
  Clone ID: 700952167H1
caccaactttaaagcctggtctaagtcagtgttgtatttctatatgtaccacttgccatacctacctacccctcatcataattcatgttatgtctatcattatttgagattc

SEQ ID NO: 86545 - DNA, 149 bp, Glycine max
  Clone ID: 700952170H1
aaacaaccttctttctttttctgtgagcctttctttcaggttcttaacttgatcagtgtgcagtgtccaaatcataagggtagttgcaaattgcaatggctaagcatgatgttgagggtggttccttctctgcaaaggactaccatgat

SEQ ID NO: 86546 - DNA, 245 bp, Glycine max
  Clone ID: 700952174H1
cctaggtagagagctcttcctcactctcattcgcaatggccgcagcagcacgtcctctcgtcaccgtgcaggccctcgacagtgacatggccaccgacgcctccgccaccgtccctatccctgacgtcatgaagtcctccatccgcccggacatcgtcaacttcgtacactccaacatctccaagaacagccgacaaccctatgcagtcagccgccgcgctggccaccagacttccgccgagtcc

SEQ ID NO: 86547 - DNA, 239 bp, Glycine max
  Clone ID: 700952175H1
ctctcaccttctttctttcttccttctcatcacaaagacacaagctttcttcctcaactaccctacccaacttcttattccactcatcacttcctttgaaattgaaaccaccaaaattgtgtttttttttctccttcactcgtagtaatattttgaaaagagttgcgctttgggttgagaattgtggcagggcctaatgggtaactgccgagattctcctgccaaggttgatgcagctc

SEQ ID NO: 86548 - DNA, 238 bp, Glycine max
  Clone ID: 700952176H1
caaaacactcataacacaaagcacaaagcaaagctcatccttgagttaaaaaatggcagcagcttcttccatggctctctcatccccatccttggctggcaaggccgtgaagctgggcccatcagccccagaagtgggaagggtgagcatgaggaagaccgtcaccaagcaggtctcctcaggaagcccatggtacggcccagaccgagtcaagtacttgggcccattctctggcgag

SEQ ID NO: 86549 - DNA, 242 bp, Glycine max
  Clone ID: 700952177H1
attaaagagaccaaaccctatctctgcatattcacttaatttcattccaaaatcttcatattcatcaaactcatcaaaatgaatctgtaccactcctccaccaccaccaccaccaccaccatcttcaccgtcatattcctcctccttgcaatattattcactctcacaccccacaaggccaacggtgccacgtgtcaccctgaggaagaagcgggcctgttgggcttcaaatccggtatccg

SEQ ID NO: 86550 - DNA, 130 bp, Glycine max
  Clone ID: 700952178H1
ctctgttctcgttttgtacaatatctttgttggtttcagatcagggacacaaaggaagatattttacaaaacgagaacagagtccctacattagaggatcagaatatctttctttgtttcttagatctgc

SEQ ID NO: 86551 - DNA, 243 bp, Glycine max
  Clone ID: 700952179H1
acccaatccaatcctcgcacacatgcatgctgtctctgccaaagttggggccaagtcataactacatttccattgttacgattctttctttccatcccaaccacttattaagcgtctgatccaatttctttctctcaccatggatcatcgcaaaccattgttacccacttcctctgacgatgctccaaatccacgcactcggaaggaccttgttctaatgatttgcggtttgctcttgctctc

SEQ ID NO: 86552 - DNA, 249 bp, Glycine max
  Clone ID: 700952182H1
ccttcaagtccaagtgattcaatcaaaccgttcatgcttaatcaagttgggaacaacaaaaaaaatcaaaacaatgtttctgggtttcggtttcatttcatcaagatgatctgtttatcttttttttttaattttaatttaaagtctttgtattttgtatgtaaagatgtaaaattatgattattaggtggtgcatgtgttgcgtcatgggccaatgttatcctctgcttttatattggaagaggccca

SEQ ID NO: 86553 - DNA, 250 bp, Glycine max
  Clone ID: 700952184H1
agaagaggtgctaccaacgagtgggaatacctagtcagtcagttgttagacacaatagtcaggttcattacaaaaagcgccggcctcacccttccttaccctccgtttctcaatctcgccgccggcgcaactgcttcatctctccggcgaacgcaaccgaattcttttcccatggcagagaatctgatagcgccgaagcttcccgtcgaaggaaagcgcaacattctcatcaccagtgccttgccttacg

SEQ ID NO: 86554 - DNA, 250 bp, Glycine max
  Clone ID: 700952185H1
tcattcttcaatggccaccctctccgcatgcgcttctcctccatggccaaaccctgattctcccaattcaaatccaaaccctaatttcctccccgaccaatctcaaaccctcgacttcgactccctcatgcctccgcaacccgaatccccaccgcccaaccatcaccactcccccgacgcctctccaccggaatcctccccgtcgccgccgcctccgtcgatcctctacctctccttcaaccaggaccag

SEQ ID NO: 86555 - DNA, 244 bp, Glycine max
  Clone ID: 700952187H1
aacaacagcaacgaagaattcgaagagaaatcaaatcgaatctcatttgatctgtgtgtggttgcggcggcggcaatggcggagcgcttggcatcgatattcgggacggagaaggacagggtgaactgcccgttctacttcaagatcggcgcgtgcaggcacggcgaccggtgctcgcgtctccacacgaagccgagcataagccccactattctcctctccaacatgtaccagcgccctgaca

SEQ ID NO: 86556 - DNA, 131 bp, Glycine max
  Clone ID: 700952188H1
tgtaattacctaaacggcgtcgctactcccttacccattctctcagccatcgttgttcctttcaaccattctctccctcacctaaatggctcacgcacctcaacctcacgcaccttacctaaattttggtt

SEQ ID NO: 86557 - DNA, 242 bp, Glycine max
  Clone ID: 700952189H1
cagaaatttaagtgaggagctagagaatgatgatgtagtctgctatgtgtgcagtggtggttgtagcacttcttcttctggcggatgtggggcccattgctgaggctgtgacatgcaccccaacagagttgagtccgtgtcttccagcaatcacttccggtgctaaaccttccaatgcttgttgcacgaagctgaagcagcaaaaaccatgcttatgtggctacctcaaaaacgctagcttg

SEQ ID NO: 86558 - DNA, 239 bp, Glycine max
  Clone ID: 700952190H1
ggagttgctgttaaggatccatctgctccccatggagttcgacttttgatcgaggactatccttatgcttctgatgggctagagatatgggatgctatcaagtcttgggtggaagaatatgtctcattctactacaagtcagatgaggaacttcaaaaagaccccgagctccaagcttggtggaaagaacttgtagaggtgggtcatggggatttgaaggataagccatggtggcaaaa

SEQ ID NO: 86559 - DNA, 237 bp, Glycine max
  Clone ID: 700952192H1
attttgctcccaaaaatttcatctctcgccattgccgtaggagagcacttcaattttctctccaataagacaattcgttctttcccttctcaatttccggcgagttctcccaatcttcgattttgttctgcaacatttatcgcttccagaatccagatctggatggacatgaaccatcgtttgcatttggggcaaccttgatttgggttttgaagtgctttatggaaactggggtct

SEQ ID NO: 86560 - DNA, 240 bp, Glycine max
  Clone ID: 700952195H1
ctcgtccttcatggggacgcgcctcctggaggcccactccggggcggggcgggtgcaggcccggttcgggtttggcaagaagaaagccgccgccccgaagaaagtttccagggggtcgggctctagctccgataggcccctgtggtatccgggcgccaaggcgcccgagtacctggatgggagccttgtcggagactacggattcgacccatttgggctagggaagcccgccgagtacct

SEQ ID NO: 86561 - DNA, 266 bp, Glycine max
  Clone ID: 700952202H1
gcggctgtagactcggtttaagtgaggagctagagaatgatgatgaagtctgctatgtgtgcagtggtggttgtagcacttcttcttctggcggaggtggggcccatggctgacgctgtgacatggaccccaacagagttgagtccgtgtcttccagcaatcacttccggtgctaaaccttccaatgcttgttgcacgaagctgaagcagcaaaaaccatgcttatgtggctacctcaaaaacgctagcttgaagcagtatgttaa

SEQ ID NO: 86562 - DNA, 211 bp, Glycine max
  Clone ID: 700952203H1
ctcggaattatgctcgagctcgagccgtgacaactagcaccatcacgtataacatggtgaaattcaggccaggaatcacgtcactttgtgtttttctttctcaacatctacagctgcatctccgtaatagagagcctcatgatggttgtagcttcacttgttccaattatttcttcttgatcatagtaaatgaaatctcaattatttcttc

SEQ ID NO: 86563 - DNA, 251 bp, Glycine max
  Clone ID: 700952205H1
tttgctttactcaccgaaagtaacggagggatttccttaacccacaaactctcaaataccctctctctctcaccgaccactatgttgcagagacctagacgccgctgcgagggcactgccatgggcgccatcgttctcgatctccgtcccggtctcggaattggacccttctccctcgggatgcctatatgtgaagcatttgctcagatagagcagcaacctaacatatacgatgtggtgcatgtcaagta

SEQ ID NO: 86564 - DNA, 242 bp, Glycine max
  Clone ID: 700952206H1
cctcaaagcaacacaagaacactctcttgaacattcatggatccagtgagcgtgtggggtaacacgcccttggcgacggtggatcccgagatccatgacctcatcgagaaggagaagcaccgccaatgccgcggcatcgagctcatcgcctccgagaacttcacctccttcgcagtcatcgaggccctcggcagcgccctcaccaacaaatactccgagggcatgcccggcaaccgctacta

SEQ ID NO: 86565 - DNA, 249 bp, Glycine max
  Clone ID: 700952207H1
atggacttctcacgacaagaaaatatagatgatccagaggacgaggaagaatacaagaatgtgcgtagagctgtgaaggagtaccgagggacaatgaatgaatattataaagcagcagttgattcatttgcaaagggggatcaaatgaaagcagaaaaactgttagaacaggggcaattttttctaagaaaggctcacgatgctgatgaagaatctaacaaaatgattcttgaaaccagaaatactgaa

SEQ ID NO: 86566 - DNA, 250 bp, Glycine max
  Clone ID: 700952208H1
ctttctctacttctttccctttccccaacccctcatacgttactctttaaatacgcaccacatcttcacgtgcctctcggttcttcagtccaaacaatggccatggttgagctctggtggattacgtgctttctctaactactgttttccacacttaacgaaccttctacacagtgagaaagacataatggcggtggagtacacatgctgctcaacggccttcttcgttcacatactggtcatcgtgctg

SEQ ID NO: 86567 - DNA, 251 bp, Glycine max
  Clone ID: 700952209H1
atctcgagcgaatcggctcgagtgaataaagtgacaagaagactacctaaaattcccgaagaagtcagggcagagataagctcttattttgtggattctgctccagttgtgccagaggataacagaaaactaaccaaacttgatgattcagctaatttcattcgcactggtttaagtcccagatggcatgatctagatgtgaatcagcatgttaacaatgtgaagtatgttgggtggattctggagagtgc

SEQ ID NO: 86568 - DNA, 260 bp, Glycine max
  Clone ID: 700952213H1
tgggagaagaggtcgagtttcacagcagcaatggtgtacgtcaaggctcagaaatcaaaagcctacttcaagagatatcaagtcaagttcaagagaagaagagagggaaaaaccgattaccgtgccaggattcggttgattaatcaggacaagaacaaatataacactccgaaataccgatttgttgttcgctttagcaacaaggacattgttgcacaaataatatctgctagcattgctggcgatattgttcttgctgc

SEQ ID NO: 86569 - DNA, 262 bp, Glycine max
  Clone ID: 700952214H1
acaatccaaatttgaacacaaggacacatgcagatgaagaagctgagttctcaggaattcttgatatctttgtccatcatgccaggaatattcataacatatgcatctatgacaaccaggatgtctatgctaagttctctctcacttacaaccctgatgagactctctctacaagaatcatcaatggaggtggcaaaaacccaacattcaatgaaaacttgaggttgaagatcacccaaatgaatgctgttctgaaatgtga

SEQ ID NO: 86570 - DNA, 253 bp, Glycine max
  Clone ID: 700952217H1
cccttcttccctttctcacttaccactctcccccttctttccaaaacactccctttccctttctattcacttcccctacccttccgtgatgatgtagatagagaataaaaagagaccagtgtgcagtgagaaagagattgctcacttcttgtgtgggtttgttttgttctttgtgttggaatttgttcatgggtgaagaaggagaagatgtgtcaagagagaaggaacaatacatgggagtttatggaaatga

SEQ ID NO: 86571 - DNA, 269 bp, Glycine max
  Clone ID: 700952218H1
cacgggattcggctcgagtctgcttaatcgaactattcagattctaaaaaatgagttggtggtgggctggagcaatcggtgctgccaagaagaaattcgaggaagaggaaccgccgcgaagcttccagagcgtgggcctggtgatcggcgtgacgggcatcgtgggcaacagcctcgccgagatcctccctctcgccgacacccccgccggtccatggaaggtctacggcgtcgcacgccgcccccgtccgccgtggaacgccgaccat

SEQ ID NO: 86572 - DNA, 247 bp, Glycine max
  Clone ID: 700952219H1
gatgaatctgggccagctatcgttcatcggaagtgcttctaagttgggtcaagagctggatggtgatcaagttcttcatgcacccagtcctgtgccatatttcagtcaagtttggttgacttatttgatatttgaagctttgggtttttaatagatatatctagtttaatgaatggatttgtaagttgagtatgttataagtttctccgttaggtccccttggaagccagacttttttatgcaattg

SEQ ID NO: 86573 - DNA, 246 bp, Glycine max
  Clone ID: 700952220H1
tgctgtatcacagggtctgattctagattgaggttgtgggatgttgaatctagctgcaacacacttgtgaactttgaaacagttcgtctgcaaataaacaaacctcttcaactagccaccactcaagattcagcccttgtttttgttccatgcatgagatctgtgaaagcatttgacatgtggtctgggaacacatacacgatattgcgtggtcactatgaatgtgtgaactcttgctggtttaat

SEQ ID NO: 86574 - DNA, 246 bp, Glycine max
  Clone ID: 700952221H1
gcagaagcgtctccattttctttcgcgatggccgcgcgagccctgttgaccagagaaaccctagccaccgttctccgcaacgacgcgaacccatactcggagctggcatagctgcagctactcattctcgtgggttgcacgtgtacacgctccccgatctggattacgactatggcgctctggagccagccatcagcggcgaaatcatgcagctgcaccaccagaagcaccaccagacttacatca

SEQ ID NO: 86575 - DNA, 242 bp, Glycine max
  Clone ID: 700952222H1
tgaatatcgagtttgctctttagagatctgtttccctctagacaacggtctgtgtgacctgttattttagttgaatcgaagccgcgaccaaatcttcctgatctttgcctgaggtgatggcatcggcgggtgtagcacctgcttctggagtaagagatgtgaatgcaaattcggttgctgttgaaaggttgcctgatgagatgaatggcatgaaaattagggatgaaagggaaatggaagca

SEQ ID NO: 86576 - DNA, 248 bp, Glycine max
  Clone ID: 700952224H1
cccaaaccatttccattcactagcacaccacccgcttcttacctcaacccgatgtcttcattcgcacttcccacggaacacgctttccagcccacgccggcattctggcttccatgtcccctgtttttgacaactttatagatcgcccacgtaagcatcggagctccgagagaattatccaaatccacggcgtcccctgcgacgccgtcaccgccttcgtcggattcgtctactcctccaggtgcacg

SEQ ID NO: 86577 - DNA, 250 bp, Glycine max
  Clone ID: 700952225H1
ttcacattcaatcaatgatggctcagcttctccacactcccttcatcccttcctcctcctccgcgctccgccgcgccgccaccattccccaccgcaaaacgacctctcgcctcgtcgttcgggccaagatccgggagattttcatgccggcactgagctccaccatgaccgagggcaaaatcgtctcctggaccaaatccgaaggcgacaagctctccaagggcgacagcgtcgtcgtcgtcgagtccga

SEQ ID NO: 86578 - DNA, 251 bp, Glycine max
  Clone ID: 700952226H1
cattggtgtggcctagctgttttctcaatgagaaagccttcatctctaaaaagcgcacttttgcagtttggggttcccttgttgcttgttatcaccttctgttatgctacttctactgctgcagcaacaactcaagtttcagggaatgaagagctgccaaagacaaacctacatgggcatgatgaagaagcagaattcggattttttcatcataaaccaatattcaagaaacatattccaattccagtata

SEQ ID NO: 86579 - DNA, 250 bp, Glycine max
  Clone ID: 700952227H1
caaaaggccagagcacagaaggggtgaattgttggcaaggcaaaagggttggagtgcactcaattggtgatcacacagctattgagctcatcggtagagaccgccctggtcttttgtctgagatatcagcagtccttgccagcctccaattcaatgttatcgcagctgaagtttggactcataacaggagaattgcttgtgtcctttatgtcaatgatgctacaaaccaagccatggatgactcaaaaag

SEQ ID NO: 86580 - DNA, 256 bp, Glycine max
  Clone ID: 700952228H1
cttacttcgagtcatagcagcagggaatataagaactttatgccatcataggctcaatcttctagaacagaaattcaatcttcatttgatgctaaatgcggatagagaatttcttgctcagaagagtgctccacatcgagacttctataatgttagaaaagttgatactcatgtccaccactcagcatgcatgaatcagaaacatcttttaaggttcataaagtcaaagctgagaaaagagcctgatgaggttgta

SEQ ID NO: 86581 - DNA, 257 bp, Glycine max
  Clone ID: 700952229H1
catctgctacgttgtgttgagctttgagatctgtctcgccaaaattcatgatttcgtgttgaatgcatcatcagagttaggtttattttttgacatttggtgtacaatgggggtgccaacttggagaaaaccagtgatctactggggttgcctattcgtcattatcgatgtatttgtactgattagcaatgcattttatcttccgggaagctacatgcatacttactcaaatggagatccgatatatgccaaggtta

SEQ ID NO: 86582 - DNA, 251 bp, Glycine max
  Clone ID: 700952231H1
ggcagaggaaggggcagagttttggagtttgaaagagaaaatattgattgcagttgagttctaatgagtaacgaatacgattacctgttcaagcttctcctaatcggagactcttccgttggaaaatcctgcttgcttctcagattcgctgatgactcctatgtcgacagctacataagtaccattggagttgatttcaaaatcagaacggtggagctggaagggaaaaccgtcaagctgcagatttggga

SEQ ID NO: 86583 - DNA, 251 bp, Glycine max
  Clone ID: 700952232H1
cggctttaattatcgtcactgtttggcggttcgctatcgaaccgggcgagggggtgggccatcccagagcgaaccggatatggatccccagcagcgtccgttaatgtcggaccgggtcaccgttaacggctccgtcacgccgcttgctcttctcgccgacggccgtctatggtggtctgagggaatccaacggtgtttgtcgatcgaaaaggacgtcctcgggatcgttgccagtgggccctacataaaaa

SEQ ID NO: 86584 - DNA, 246 bp, Glycine max
  Clone ID: 700952233H1
atttgctggtcgaccatagtcaactgaagtgaaccttgttgattggctgaaaatgatggttggaaacaggagatcagaagaagtggtggaccccaacattgaggtgaagccatccaccagagctttaaaacgggctctcttaactgctttaagatgtgtagatccagattctgagataaggcccaagatgggccaagttgtacgaatgttggagtcagaggaataccctttaccaagagaggaccg

SEQ ID NO: 86585 - DNA, 245 bp, Glycine max
  Clone ID: 700952235H1
cattattagtgcagtgctaaccagcagggcaattttccaaaggatgaagaattatactatctatgcagtgtcaatcaccattcgtatagtatttggtttcatgtttattgcattgatttggaaatttgattttgcacccttcatggtgttgattattgccatactaaacgatggtaccatcatgacaatatccaaggatcgagtgaaaccatctccaatgccagacagctggaagctgagggaga

SEQ ID NO: 86586 - DNA, 244 bp, Glycine max
  Clone ID: 700952236H1
tagttgctttcagataactgatagttgtgtgcaattatttgaattcaagaatgtctcaacccgactcgttggtggctgagattgaggtgaaaacctctgctgatcacttttacgacaccttgaagggtaagaaacagcatcgtattcatgatgttgcccctcatcatatccataaggtggaagttcatgaaggtgagtgggataaatctggcaatatcaaggtgcttacattcgctgatgggga

SEQ ID NO: 86587 - DNA, 172 bp, Glycine max
  Clone ID: 700952237H1
ggcttatggtggatacctaggcacccagagacgaggaatggcgtagtaagcgacgaaatgcttcggggagttgcatataagcgtagatcgcggggattcccgagataggtcaacctcatcgaagtgccgccggatccaggggcaagcaagatataagctggtgaactgaaac

SEQ ID NO: 86588 - DNA, 243 bp, Glycine max
  Clone ID: 700952238H1
gttccacgcgccgtcctcatggatctagagcccggcaccatggactccgtcagatccggcccctacggccagatcttccgccccgacaacttcgtcttcggccagtccggcgccggaaacaactgggccaaaggtcactacaccgaaggcgctgagctcattgactccgttctcgacgtcgttcgcaaagaagccgagaattgcgactgcttgcaagggtttcaagtgtgccattctcttggt

SEQ ID NO: 86589 - DNA, 239 bp, Glycine max
  Clone ID: 700952239H1
atttcgccttaccaaccccagggaaactccgaatacaggcctagatcgtttgtacagacagacttttagggtgctaagatccaaagtcgagagggaaacagcccagatcgtacgctaaggtccctaagcaatcacttagtggaaaaggaagtgatcgagcgatgacaaccaggaggtgggcttggaagcagccatcctttgaagaaagcgtaatagctcactggtctagctccatggca

SEQ ID NO: 86590 - DNA, 242 bp, Glycine max
  Clone ID: 700952240H1
ggtatgacgaaggaggatttgataaagaatttggggacaatagcaaaatctggaacttctgcatttgttgagaagatgcaaacaagtggagatctcaatctgattgggcagtttggagtcggcttctactctgtttatctcgtggctgactatgtcgaagtcattagcaagaataatgatgataaacagtatgtatgggaatcaaaagctgatggagcatttgcaatttcagaagatacatg

SEQ ID NO: 86591 - DNA, 246 bp, Glycine max
  Clone ID: 700952242H1
accatgttcattattcccattgtctacgtttactgtttataactgaatctaagacaacataaatttaacatcgtgtttctcgttttgatcttgttcctgtggttagagtttagaatttgaagtagtagctgcattccatttttctccccttggaagcacgaggtgaaacagatggcattgactttgaaagaggaagacgcagctgactgggtttacagaggggaaggagcagttaatcttgtgctc

SEQ ID NO: 86592 - DNA, 248 bp, Glycine max
  Clone ID: 700952243H1
cgcagaacctaaccctcacgaaaacccctttcgattccgataactctcgttgtgccgaaaccctaaccttaaccgggttttctcgttggttgggattgaattggcatcggagggaggcgatcgattggaaaattggtagtagtagtttagcgttgaagaacgatgtctgctgctgtgtgcggaagcaagacatctttcttcgaagagcttcctccttctccgccactctccaagatgctccgttgttc

SEQ ID NO: 86593 - DNA, 179 bp, Glycine max
  Clone ID: 700952244H1
gtttctgtctctgtgtttgcggctgaggattccgaacgagcgaccttcttcgtttctcgcaaagtttaagtcatcatgggtaaggaaaagactcacatcaacattgtcgtcattggacatgtcgactctgggaagtcaactaccactggtcatttgatctacaatcttggcggtattga

SEQ ID NO: 86594 - DNA, 239 bp, Glycine max
  Clone ID: 700952245H1
cgagaaaggccactggtaagtactaccaccatagcagctggaaagcaagagaggaacatgatgaaagttgcacctacgagtccgcttcccacgaagcacgtgcggattctgtttcaccgcacgtgccttgagcattcaataattaccaccaactcgccaaagtcacttaattataaacgcggaacgatttcaccaggagaagcagaaccatcgctcaagctcacactcacagtaaaatc

SEQ ID NO: 86595 - DNA, 237 bp, Glycine max
  Clone ID: 700952246H1
ttctctctcacataacactgtttatcgatgatgctctgaactctttatctatatatgcctctctgatgccgatgggtgcctccagttttccggcaagcttcaaacttcccttcgccggccccgattttgatcacttttccggtatgaatcgtttgcgacacccccattgttgatttagaaatgctagatctattcgtcgcatcacacgttcgatccaaaacctggttccacaagagg

SEQ ID NO: 86596 - DNA, 265 bp, Glycine max
  Clone ID: 700952247H1
caatctcagcatatgaatgcatgaataagagagaaagtgcaaatttaaggaaattccagctgcttgcttcagatgttgtgtctgtttttgatcttctccttcgttaccaatctccgatgatttctctctcagtaaaatccaaaggaaaaaccaaaaataacatcaaaactttttcatccatttcaatttccttctctgatttgcttactcttcagattgccattttgcttctgatttttgggtcgtaccttcatacccttttctc

SEQ ID NO: 86597 - DNA, 288 bp, Glycine max
  Clone ID: 700952248H1
cgtacgtaatctcctcgatcctcaagttccaccttgtgacatctatttccaaaagagagatgccgatatttttgggaagccggaagatctcaccaccctcttatgtcaattatcagattagaaggtcagaatgctctctgcaaccaaggaacatgaatatcacaagactacagggaggtgtgaatgtcagcagtagtgacaatcccaaacctaaaagtttaggtccagacagttcaaatggttcagcccatgtggatcatccatctagagagttccagattgcagtta

SEQ ID NO: 86598 - DNA, 187 bp, Glycine max
  Clone ID: 700952249H1
attcggctcgagccgcattcgcgccctcctcggcaagctggaacatgaattggaggaactcgaacgcagcgtggaaccgtcgtggccaaagttggtggaaccgttggagatgatcattgaccagttatctgtagtttggggcatggttaatcatctcaaggctgttaaggatagttcggagctacgt

SEQ ID NO: 86599 - DNA, 238 bp, Glycine max
  Clone ID: 700952252H1
tggaaccacaatatttactgccgtgcaaggttcatctatcacatgctaaaatgcatttaatgttcatcaacattggtgtctaggatgttgtatcacttattataatcctagggaataatctctagtcgccactggcaccaagtctaacaagaggctataatatatggatgatatgctgaacctatgaactatgtctactaaattatgagtttttcaatctctaaattctctctaaaag

SEQ ID NO: 86600 - DNA, 240 bp, Glycine max
  Clone ID: 700952253H1
cttggtttccaattgcgtgcacccatgtcctcttttctctccttatcactctctgcgccctccctccacgattcttccttcctccatggaacaaagctctttcccttttctcgaagagtggcaccacgccgcttcaactcttcctctgccaagtgctccctcgaccacatccccaaacagttcagaaaggagaatctcaaagatggattgatggaaaactacaagaatgcacctcaatct

SEQ ID NO: 86601 - DNA, 238 bp, Glycine max
  Clone ID: 700952254H1
cattgttaaaagtttctttatttcaagtgaagttagttagttatatttatatacacaatcatgtcaatgagatcaattggtacaagccttagccttatggtatggcttgtaattgcaacatcagcattagcaaaatctgataaccccccagtcctagacacacaaggcaaccctcttgagcctggcaaagattactacatcaaacctgccataaccgacgttggaggccgcgtcactt

SEQ ID NO: 86602 - DNA, 239 bp, Glycine max
  Clone ID: 700952256H1
aaatgaaggccatagtgataacgaggccaggaggtcccgaagtgctccaacttgaggaagtggaagatcccctagtcggagacgacgagcttctcatcggagtccacgccacttcccttaacagagccgatacctttcagaggaaaggctcctaccctccccctaagggcgccagccttgacctcggtctcgaatgttccggaactgtcctttccctgggtaaaaacgtttccagctgg

SEQ ID NO: 86603 - DNA, 242 bp, Glycine max
  Clone ID: 700952257H1
gaacagtcaactcagaactggtacggacaaggggaatccgactgtttaattaaaacaaagcattgcgatggtccctgcggatgttgacgcaatgtgatttctgcccagtgctctgaatgtcaaagtgaagaaattcaaccaagcgcgggtaaacggcgggagtaactatgactctcttaaggtagccaaatgcctcgtcatctaattagtgacgcgcatgaatggattaacgagattcccac

SEQ ID NO: 86604 - DNA, 244 bp, Glycine max
  Clone ID: 700952258H1
ctcacatgtgcggcgcgccggtggtgctcaacatgttaaccaacgcgaactccccgttggagaaaccggttcagatcctcaccgccggatcgccgcctcctgcggcggtgctcttcagaacagaggctttggggtttgtcgtgagtcacgggtatggtttgactgagagcagaggattggtggtgtcatgcgcgtggaagggggagtggaacaagttgccggcgacggagagggctcgactgaa

SEQ ID NO: 86605 - DNA, 170 bp, Glycine max
  Clone ID: 700952259H1
cccgccactactcctctgaccgatggcgccgcgtctcttgtcatgcttccgcaacaagcacgccggcgggtgcagccaccacgacgagggcatgcggcgcatcatcggatgtgtcggctgctgtggtgaccgaatgagcagtattggggtgtgttctgcgtgtggatgtt

SEQ ID NO: 86606 - DNA, 242 bp, Glycine max
  Clone ID: 700952260H1
gattcctaatacaaacatggcaatgaagaagctcttgtgggttgtcctgtctctatctttggttcttggagtggccaatagctttgattttcacgacaaggatttggcgtccgaggcaagcttttgggacttgtacgagagatggaggagtcaccacacggtttcgcgaacctcggtgacaagcacaagcggtttaacgcgtttcgagcaaatgtgatccatgtccatgacactagcacgat

SEQ ID NO: 86607 - DNA, 249 bp, Glycine max
  Clone ID: 700952261H1
agcaagatgagcctgaagaagaagtccaaacacatgcttgaaacaatcactggattcaacagggcaagctaggattcagtgggtccaaaagaactacatgatttacaactactgcactgacactaagcgtttcccacagggccttcctcctgagtgcacaatcgcatgaaaacaaaactatttcatattataaacctctcatacctcatgaattcattttttttttttcttgtcttgtgtaaattaata

SEQ ID NO: 86608 - DNA, 263 bp, Glycine max
  Clone ID: 700952263H1
ctttcttcttcttctcttaaaagagcctttgctttttctttaggcctttccgaattaagtacttgtttcattttctctcgaagcaagaaaaatgttcatcgagagtttcaaggttgagagtcctaacgtgaagtacacagagactgagattcagtccgtgtacaactatgaaaccactgaacttgttcacgagaacaagaatggcacttatcagtgggttgtcaagcccaaaactgtcaaatatgaatttagaaccaacaccc

SEQ ID NO: 86609 - DNA, 262 bp, Glycine max
  Clone ID: 700952264H1
atgcacgatttctgcttcacgatcccctacggattgatgttagtgggtggtggactgttcgcctacataagcaaagggagcatcgcttctctcgccggaggtcccggctccggtttgcttctcatcgtcgccggctatctcagtctcaatgctttcggcaaacgaaaaaactcttacctcgctctctttctcgagaccgtttgtgcagccatactaacttgggtcatggggcagcgatatttggaaacatccaagattatgc

SEQ ID NO: 86610 - DNA, 239 bp, Glycine max
  Clone ID: 700952266H1
cctttctctaatccaaacatctctccgttaatgctctcaccacaaacttcaatagactagccaaaagctaacaccaactataggccaaatcaccaataaatattatttcccgttcttttggcgtgttggccacccactgaacacatttgcactcacacatagaagcagagagaggccattggttggtttcagagatgggaagcatgcacatagaaaccccagaaacttttgctgatggt

SEQ ID NO: 86611 - DNA, 239 bp, Glycine max
  Clone ID: 700952267H1
gacattttcctgatcttctgctgtgccaagaaagcagtaatctccatgagcttctattgaattgatactttgatcaagatggatgggaaaaactctcttcaaataactagaagtggtattggtgcttatgatgatgatggacatgccaaaaggactgggaatttgcagagtgctgtagctcatatcattactgctgttattggttctggtgttctttctcttgcatggagcacttccca

SEQ ID NO: 86612 - DNA, 236 bp, Glycine max
  Clone ID: 700952269H1
tttgattagtgtggcctagttgttgttttctcgatgagaaaggcttcttccactatgcattgcgcacttctgcgcttttgggttcccttgttgctgcttgctagcttcagctatgctccttctgtttcggccacaactgaaatttcagggaatgaagtgaacacagatgggaaggtgataaatgaagagttagcaaaaccaagtctaaaaggacatgatgaagaagcaaagttcaa

SEQ ID NO: 86613 - DNA, 226 bp, Glycine max
  Clone ID: 700952270H1
ctctcagctcaggagtgtataatctgagcgatgtcagatcttgaggctcccttgcgccctaagaggacatacgtttgggtggactatttcgttcagtttcgatggatccttgttatttttgtggtccttcccatctcgttcaccatttgtttccttacataccttggggatgtaagatctgagtggaagtcctataagacgcgtcagaaggaacatgatgagaatg

SEQ ID NO: 86614 - DNA, 234 bp, Glycine max
  Clone ID: 700952272H1
atgggcaattgttgaacttctctggctgtggaaatacattgaattgtaaccatcctgtggtcatggaactaattcttgacagcctaagacactgggtcaccgaatatcatgtggatggatttcgatttgatcttgcaagtgtcctttgtcgaggaattgatggctcccccattaatgcccccccgcttattagggcaattgctaaagatgcagtattatcaagatgtaaaatta

SEQ ID NO: 86615 - DNA, 242 bp, Glycine max
  Clone ID: 700952274H1
gagaaagtgaaagaaattgtggagattaagcaacgcagtcgtggcagaagagaatcagaaaacaatggaagttttgaaagaaagggaacaggcactgcaagatcagttgcagcatgccaaagacagtgtttctactatgcagaaattgcatgaactcgcacaaaaccagttgtttgaactctgcgcccaatctgaggaagagagggcatctaagcaatcagaggtcaatcttctgatggatg

SEQ ID NO: 86616 - DNA, 242 bp, Glycine max
  Clone ID: 700952275H1
atcctatcctatcgtagcaaagaaagaaagaaagaaaaccctagcttaccttttcaactttcaagatgcaaatctttgttaagacactcactggtaagacaatcacccttgaggtggagagttcagataccatagataatgtaaagtccaagattcaagacaaggaagggatcccaccagaccagcaacgtctcatttttgctggcaagcagcttgaggatggacgtacacttgctgattac

SEQ ID NO: 86617 - DNA, 244 bp, Glycine max
  Clone ID: 700952276H1
cgagaggtacttgctcacagatatatttttttttttgtctccatcattttctcgagagctttcagtttctgtggttcatctttcttcttcttaatctttccccccctctctgtaacatcccgcttctctgaatccctttctgctaatcatctgtctttcaagctaagattttctggtttgtcttttaattcaccaaaaagcaaacttagaaggatttttcgaaagccaggtgttttcagaaacg

SEQ ID NO: 86618 - DNA, 247 bp, Glycine max
  Clone ID: 700952278H1
gatcaggagatataatgatacatcatatctcgttgttttattacacctagcttcttcgccttgggtttggtacagaactgccgatgatgacattgaagaatcagtaccatttgatttgctggatgatgatgatccttggatcagaaccactgattttactcctagtggggcaattggtcgatgcaatttttatagaatttcaatcccacctcgccatggtgcgaaattgatgaaggccatgctttat

SEQ ID NO: 86619 - DNA, 257 bp, Glycine max
  Clone ID: 700952279H1
gacagattcatagacataccagatgaagttcttgatgtttacaagctttggcgcccgacccctctcattagagccaagaggctggaaaagcttcttgatacgccggctaggatttactacaagtatgaaggtgtaagccccgctggatcacacaaaccaaactctgctgttccacaagcctggtataatttacaagcaggtgtcaagaatgttgtgacagaaactggtgctggacagtggggaagtgcattggcctt

SEQ ID NO: 86620 - DNA, 253 bp, Glycine max
  Clone ID: 700952280H1
ctccgcattcggctcgagtgattttgcacccttcatggttttgattattgccatactcaatgatggtaccattatgactatatccaaggatagagtgaaaccatcaccacttcctgatagctggaaactgagggagatatttgctactggcgttgtgctaggaagttacatggcactaatgacagtagtatttttctgggcaatgacagatagcaacttcttctcgaacaaagttggtgtgaggccattgaga

SEQ ID NO: 86621 - DNA, 250 bp, Glycine max
  Clone ID: 700952281H1
tcggctcgagcgatgatgaacacaaatgttggttccttcaagattcctcctgcttccctctcaagttttgatgtgataagtgttattgtctgggtccctgtctatgacaggattattgttcccattgcaaggaaatttacaggcaatgaaaggggcttttcagagttgcaaagaatgggaattggcctttttatttcagtcctgtgcatgtcagcagctgctatagtggagattgtgcgtctgcagcttg

SEQ ID NO: 86622 - DNA, 235 bp, Glycine max
  Clone ID: 700952283H1
gcctgttatccttatggtgatggttcagcaatgttgacggtgagtgatgatgaattctgggagggagtttcgcctgtggaatttggcgatttgcctgctctgcaagatgctgtaactgttgtgggatatccaattgggggtgacacaatctctgtgacaagtggtgttgtttcacgcatggagatactctcttatgttcatggttcaacggaacttctgggactgcagatagatg

SEQ ID NO: 86623 - DNA, 234 bp, Glycine max
  Clone ID: 700952284H1
ccttcttttctctctctctctctcgtgttctgagctgctagaagcaatggagaggaaaagaagccatgcttctttcaccatgtttgcaatgcttgttggattgctctctcagagccttgtcattcctgtaatatccaccactgttgcagatcagaagaactactacaccccagatccacatgctggaagtccccccacaggctcacacaatagtagtcctccatctcatggcca

SEQ ID NO: 86624 - DNA, 232 bp, Glycine max
  Clone ID: 700952286H1
gagggttgcatgaagggagagtttgattcctttgggacagagagtgagattaattaaaatattaggtagttaattaatttcattaaaaggaaaggtgaaggctcctgcgatggagcaagcagtgtcactgattggtgccctgaacctggtttctcgcaacctccctcttcccccagacctctttgacaccgtttcttctatctatcaccgatctaatcctctctcttccgag

SEQ ID NO: 86625 - DNA, 167 bp, Glycine max
  Clone ID: 700952287H1
tactcgagccgattcggctcgagccaaccaccaagcctatattgtctatcgacttttctttctctctctagtctcaggcacacaattccactctctctctctctctctgattcagcttcagcgaaatcgagttctaaccgtagatcgtgcttttgcgtctgagaagc

SEQ ID NO: 86626 - DNA, 192 bp, Glycine max
  Clone ID: 700952289H1
gctgattttaggccttctgcagcaagtgatgatgaccttgatggtatgcaaagttcgcctggaaggtcacaacgagggcacccgagagaggatgttctcatgactgatcaaactgaggatgatcgagatgatgatgattttgatgatggatatgagatgtatcatgttcaaggaacacttagagagtggggt

SEQ ID NO: 86627 - DNA, 239 bp, Glycine max
  Clone ID: 700952290H1
tgtgcttctcgcacggaattctgcgttttcttttccaccacaaacgcgttttacaatcaagagaatttcgcacatcgtaacaagccaattcatttaaagtaggtatgctcctctgtcatttaacatttcttagacttagactcaataattgctcatcacttggcagattcaccaataccatttatattttctgtaggttgctcacacttacagttctagttcaattcaattcttcacca

SEQ ID NO: 86628 - DNA, 238 bp, Glycine max
  Clone ID: 700952291H1
ctcttggcatcttgtgttgtgtccctcttttaagctatttccttctcttaacacaattggttgtgccaattgccatagtcaccaaccaattaacaaaggtatatatatcatcatatcatcaccaaatgaaaaatattgggttgttttttcttgtggtggtggctacttttgtggtggcagccacagctggtagcttttaccaagactttgaaataacgtggggtggtgagcgtgccaa

SEQ ID NO: 86629 - DNA, 245 bp, Glycine max
  Clone ID: 700952293H1
catccatggcgtgaaaccctagttaatagttagtaccaaatgtcaaggctattctattacgatgtgatgtcccagcccacactaaagtagagtcagtgaggcttgttgagttcatgtaaagaaaagttcggagtgtcttggtggtgttatcggtgttggggggagtggagggacgtcactcttgtcgtctcccttcgcctctctcccaattggggttggtggcagggcgatggagaatttggtta

SEQ ID NO: 86630 - DNA, 259 bp, Glycine max
  Clone ID: 700952296H1
ttctcttcttatttctatttctctctccccaaaagcttttgtttctctctgcttatggaaggcccttaaactttcgctctctctgcttcactttctcgcttttgcattttcttgtgaaaaaaaaaatcctcagaacaaaaataggtcttcttcttctctgatctaccaaagcttcaaattctccttagtttggtttgtctgtgagtttggagtgtaatgtcgccgccgacgctggtaacggaggaggaggggcggacac

SEQ ID NO: 86631 - DNA, 278 bp, Glycine max
  Clone ID: 700952302H1
gtaaattatgtggccgacaagctatgcttgatatgcttaagaaggctgagagagaaaaactcagtcagttacaatgaaaatgctttccttgtcacaaccaaatccatgatgtatctattaagaaagccaccaaagcattttgaagcactggtggaagagcactttagaaaatgctcccaacatatacttcttgcttgcaaggcttatcttgaaggagcttctattggatgtgcttttggtagtggaaaaactggacatgaaaaccagaaggggacttc

SEQ ID NO: 86632 - DNA, 269 bp, Glycine max
  Clone ID: 700952304H1
caggtgtcttcttatcttcctaatcatctgtcgcaggctaggagggtccctcctttcatatttgatggggctctctgtcccgctaaggaattgtcaagttgtatgagagatgtgtcattgcatgtgccaattatcctgagtattggatacgctatgttttgtgtatggaagccagtggaagcatggatcttgcaaataatgttcttgctcgggcaaccccagtctttgttaagagacaaccagagatacatattttttgtgctcggttc

SEQ ID NO: 86633 - DNA, 265 bp, Glycine max
  Clone ID: 700952305H1
gttagaagaagaatgatgatgacctctggtgaagctgtcaagtacaagagctccttggatgcattcacacagatcctcaagaatgagggtgccaagtccttgttcaagggtgccggtgccaacatcctccgtgccgttgccggtgctggtgtgcttgctggttatgacaagttgcaggttcttgtgttcggcaagaagtacggctctggtggggcttaagttctaatgctgagtcagtactattatttgtttttagatggcgatg

SEQ ID NO: 86634 - DNA, 275 bp, Glycine max
  Clone ID: 700952306H1
atacttagaaacagcaactatgtctctcatgcagcttactagctcccctgttggctcactggtccgtttcattgtaatatttgctttatggtacagaaccatggctttggccaagttgccaccaaacgcttcatcagttccagcagttttagcgtttggagattccatcgtggacccaggcaacaacaacaacataaaaacattgatcaagtgcaacttcccaccttatggaaaggattttcagggaggaaacccaacgggtcgattttgcaatg

SEQ ID NO: 86635 - DNA, 208 bp, Glycine max
  Clone ID: 700952307H1
tttttatctctatctttcttcacatcttaaccttgttcttaccagatggctgcctcagttaaactcttatttttgtcctttctctcgttgttcatctctttctccatagctcaaacctctttcagaccaaaggcacttgttcttcctgtaaccaaagatgtttctgcctcagttcctcagtatgtcccacaaatcacacaaagaaccc

SEQ ID NO: 86636 - DNA, 272 bp, Glycine max
  Clone ID: 700952308H1
acgaagtgacccaatttggtttcagtttctcgaattctgggaacgtgtctccgccctctggtctcttccccttctccgcaagcaaaaccccaatttcttcttcacgaaccctaattcactcttcccattccaaatctcaatcacctttctgattcaatctttctctcctcgccaatctcttcgttcacctcgcaaatcaaggtgagggattcgaattgaaacctcaagatgccagccacagcaggaagggttcgtatgcctgcgaaaaatag

SEQ ID NO: 86637 - DNA, 272 bp, Glycine max
  Clone ID: 700952309H1
gtatagtagcagtagcagcagcagcagcttgtcgcgtgcgtgcctctccggcgaggccgtaacaatccacaaacaacaagcttttaaatttctccttcgtttcgcttccaatggcatcaaatagccattcaccatctctcgagatattagttcgaggaccagaggatttctcgctctggaccggaccccccttcgcgaacgatcaaccaagcgtcaagctcgagaaagtgaactgcatcaatgcgaagttcagcgtagacggatccaatctc

SEQ ID NO: 86638 - DNA, 272 bp, Glycine max
  Clone ID: 700952310H1
attcattcaccaccctatccaacatggctgaggagactccaaaccagacaaccacaccaccccctcctcaagagtcagtggtgcaagtggaggaagtggtggtaaccgatgttccacagcccgacaaaacaacaactacagttccagttgaaagagattcgcaacctcaaccttatgagccagagaagaagaagcccgttgaggaaaccgtcactctcgagactcacctctccaaacccaacaatgctgaccacaccaacaacatccctgaa

SEQ ID NO: 86639 - DNA, 270 bp, Glycine max
  Clone ID: 700952311H1
atttcaaaggacattcggctcagagcttcagctggaaattgatcatgaggtaatagcatacatactcgcagctgcttggttatcagacaagaaaaatgcagtggaggattggattgaacatgttcttggcaaaggcttcgttgaagctcagcagaagtaccatcctgcagctcaatatgtagtgaaactggttaattgtgaatccatttttgtggaagagcaagcccctgatgtatgccttccagctagaattaacatggactaaatttt

SEQ ID NO: 86640 - DNA, 269 bp, Glycine max
  Clone ID: 700952312H1
cacaattactggtacaacaacttccagttccatccatctgtcgtttctcgatctccacagttctccactgttccaactccaaccaaaccagcttctgactaatttccctctctccgcgtttacgacaccgcgtttcgtcagatctgaaattgcaatggtcgcatgagcgggaccggcgtcgtttcgatggatcacgtgcttgtggcgctgggggagacgaaggaggagagggaggttcgtattcggagcctgttcaacttcttcgacgc

SEQ ID NO: 86641 - DNA, 270 bp, Glycine max
  Clone ID: 700952313H1
tttatagttacacacaaaagcttagccctaagctagcattttcccagcaccaatttatttgcttggatcggaactagggttttgaaattgatgggtacagagagaaagaggaaggtgagcttgtttgatgtggtagacgattctgcggcgaagatggcgaaatccaatggcggcgccgctgctaataatctcaccaatcattggaccgcaaggccttactcccaaaggtacttcgagattttggagaagagaaagaccctccccgtttgg

SEQ ID NO: 86642 - DNA, 271 bp, Glycine max
  Clone ID: 700952314H1
ctctgctagagcctagaagccagaaaactgctgtttctcgacccacacttttgaacttgaaaacttaaaccctagttctctctcttgtctttcttctgcatcttcaaccatgtcagcgatgctgcaacctcagatcattctgttgaaggaaggcacggacacttcgcaagggaagccgcaggtggtgagcaacatcaatgcctgcaccgccgtcgccgacgtcgtccgcaccaccctcggccctcgcggcatggacaagctaatccacgac

SEQ ID NO: 86643 - DNA, 226 bp, Glycine max
  Clone ID: 700952315H1
gtacattgggacatggctaaattttttagcacatgtacttgttaatggttagcttagatttgatcacatttggtcctggagttcattttagttttacaacagctactctccaggaccaaatgtgatcaaatctaagctaaccattaacaagtacatgtggtcctggagattagctgttgtaaaactagaatgaactccgttgcaaaaatggtcaattcttttggcc

SEQ ID NO: 86644 - DNA, 275 bp, Glycine max
  Clone ID: 700952316H1
ctcgcagttcccttctcctcgactcggatcggagcaaagctctcctctgtccacaatcctccgtttcactctctctaaaatcctaacactccgaaatgcccgaaccggaatcgcaaaacggacacgagcaagacccggagccgcagccagaaacagaaccagtgccaacagagcaaacacaaccacaattggagccgaaatcgaaatccacgcccgaaccagaaccaaatccgcagccagaatcggagccagtgccaacagagcaaacgcaagca

SEQ ID NO: 86645 - DNA, 276 bp, Glycine max
  Clone ID: 700952317H1
attttgctctagctttgcaagcctcttcttcatctaaaaatagtaggacttgctttaatgtcaaagctttgaacttgaattctttgaattataatgccaatattgctagtgaaactgaaattaggagtgtaaatgcaaagggtaaggaaatttcagctttggatagggatgattggaatggtaagtttttcccttgtgatgatgagctttctagcattgattatagtaaggagttaactgtgagtgcttctcctttggtggatgatgagaaggcaa

SEQ ID NO: 86646 - DNA, 274 bp, Glycine max
  Clone ID: 700952319H1
ctttcttctccttcactttctccatccatttttagcgttcagtgcttttgatgcttctgctgtccttccagatcttgcacatcattcagttcttctgcttcttcttcactcagatttctgtggggtgttcctcatgtcacggaagtaaaggcaaaaggaggtttctcttcttacctatatgaacttttggtgttgaatttggttggtgtttaaattattgaagagtgtattggaagattgtggagaaggacgtgttgaagttgattgtggagtt

SEQ ID NO: 86647 - DNA, 277 bp, Glycine max
  Clone ID: 700952320H1
ccaccccagaaatagagagtaagcctgagatcatggaaaaagttggtgtggctgtaaatagcaaaaatcaagaatccaaagcaacttccaccattaccattaagggtttcatgagccttctaatgaaaagtgtagatgagaatggtgatggtagcaagagagttatttctctgggtatgggtgacccaactctcaccacttattttcccatctcaaatgtagctgaaaaagctgttgctgaagcacttcagtcacacaggtttcgtggctatgctcc

SEQ ID NO: 86648 - DNA, 272 bp, Glycine max
  Clone ID: 700952321H1
gaaaaagcaattaactaagcatatatagcgtgtaagacagtgagaaaaaaagtgttgtgtagagagaaatggctaggtggtgcatcttggtggttcttgcccttgtcgtggttgcaagtgccagaaacatgcccaatgacgcaggtttggaggaccagaagaacttcctcgggtatgggttctctggagttggcaacaatgggcttccctttggaggagtgggttctgggtttgatggtaatatgggtgggccttctgggctcggtggattt

SEQ ID NO: 86649 - DNA, 271 bp, Glycine max
  Clone ID: 700952322H1
cttcttcttcttctttcccttttattcctcattctctgtcggtacttcagagtctcaacttcgatcttctcctcaaaatggctcatactcttttgttttagggtttccacggtttctgggtcaccttcaagttcgtccctttcggtgttttccgcccccattctgcagtgcttgctaggtcttgaacccgctagcgctggagttagtttcaagtgggggcgtggcaaagggaaaaaaggggtcgtcgcattgtgtttgtcagaagagaggg

SEQ ID NO: 86650 - DNA, 275 bp, Glycine max
  Clone ID: 700952323H1
ctcgagccgaatcggctcgaggttaaacttcctttagagggtcaactagatactttatctttcaagaatatattagccaaatttcctagcgaatgcaatgctgctgcaacaattagcgacatctctcctcatttgtgcttcatatgtctattgcatttggcaaatgagaaaggattgagcattcaaaactcctccaacttggatgatcttgccatacggtttccacaagttgctgattctataaggggaacagtttagattcctcttcactcaat

SEQ ID NO: 86651 - DNA, 274 bp, Glycine max
  Clone ID: 700952324H1
caaaacacaagacagagtcattcagcaaggcttgaaacgagaagcgaggatgcccatcagatgtattctgcattggcaaccgaaccaaggaagcgttgtgaacagccaagtcctgaatgagatctcgcagtgcgtcgaaagccttaacggcgtcaaagaaggaagatgcaaagcctccctcactttctacagacccaatttacgagaccaatcggtgaccatcgattttcctcgcgattttctggggatatcgatgctggagcagccgaacaaa

SEQ ID NO: 86652 - DNA, 272 bp, Glycine max
  Clone ID: 700952325H1
tgtccattgatgatgctcgtctttgcaaaccgggaacacttgatcctaccaaagtaaagggaaaaatactagtctgccttcgaggtaataaattaacttcagccagtgagggtgaacagggtaaacttgctggcgctgtggcagttctagtgcaaaatgatgacccaagtgataatttacttctggccgagaatcatgtattacccgctgcaagtataagtggaacgggaagtcataatattaaaaacggtacaggcaacaatggcaataac

SEQ ID NO: 86653 - DNA, 270 bp, Glycine max
  Clone ID: 700952327H1
accccagctacttctccctcatccactcacaaaatgtgccaggccctctccgccccatcgcctccgtgtacggctcttctctccttccttttcttcctcctcacggtggtgggcccggtctcggtctcggcatggcggccgtggccccagaaaaacaatatgaacaccaccgattacgccttcggggactccaagaaatacgaggggtcctcggagttcgtgaagctgaggtaccacatgggaccggtcctcacgaccaacatcactgtt

SEQ ID NO: 86654 - DNA, 271 bp, Glycine max
  Clone ID: 700952328H1
tcacaaccttgaagattgaaaagaattctgaaaagaaatattaaactaagaggttccctttttgcagttagtggcactgcatgtgataaggaatcactcagtttaactttatatatgcatatcacccctcggtcatctatcatataccccttctccttccctccttataacatcactgatttctcagcacttgctaaatccctctccatcttttgcatgtcctagaacttttttccaaattcagaataacaatttggcatttcatcagtct

SEQ ID NO: 86655 - DNA, 269 bp, Glycine max
  Clone ID: 700952329H1
ctcctttaccttctcttcatgagcttcgaaatccctctcgctttcagagccgaaaacggggtcgttttcctcaccgacgcattgcccatgcccatgccactcatgctcgaagaatcacgcaacagtgtcaaaatcagagcacccacagggttaaagttggagaaagtttccaccttgaggttcaacgagagcttcacggagggttcggagctgcacaaggtggcgcggcaccgtgggttgccggggagaagctctggggggaagtggag

SEQ ID NO: 86656 - DNA, 269 bp, Glycine max
  Clone ID: 700952330H1
gaaaatgaaagtcattgttttcttcgttgctataataattttaggtgcagaatggcaatgcaatgggtcagagcatgagcatgagcatggccacagctaccaaattttccctttgcgaatgaaaaccggccccggtggccactacattccggaggtatcgtgcaaaagttggaggcttggtgtggaagcacacaacgtcattgactggagaaccattcctcaagattgcgagggatatataggaaactacatgcttggccaccaatata

SEQ ID NO: 86657 - DNA, 274 bp, Glycine max
  Clone ID: 700952332H1
gctatttccttacaaagaatggtgggtagtacctgccaaagttgccttcgatcaaactgcatggtctgcactttggaacagcatatattatactgttgttgcattactgcgtcttgatcctcctatgagtattttaaatgaattgaaggcaacgtttttccccatgttgacggccggatggaagctatggccatttgcccatctcattacttatggtgtgataccggttgaacaaagactcctctgggtggataccattgagcttatttgggtg

SEQ ID NO: 86658 - DNA, 271 bp, Glycine max
  Clone ID: 700952333H1
ctcgagccgaatcggctcgagcacctgtttcgtgcaaaaacaattactgttgtctctccacagtccctccctcacattctcactctagctttttagagagagagagagaagaagaagaagacatggagatcaagaagaggtttggggtgttgatgtgtgcagaggattcggagtacgtgaaaaaagtgtacggagggtattctggggttttcgtgaaaatgctggcggaggaacggaaacatgggacgtgtacaaggtggcgcgtggggag

SEQ ID NO: 86659 - DNA, 276 bp, Glycine max
  Clone ID: 700952334H1
ctttcttttctttgccaacactccttcgattaggggtttcgatcccaaattacaaattggtcgccatgaacgcaacctcatactctgctcttccttctacgttccgcagtctccatcatcggaatttctcagcgttttgttctgatatccaaaatcctggctatgttgattgccattcaaattgtaataagtctacatctcaagcgtctttgtttttgtgttccgactccaacagtagaagaaatggtgtttttggtagaccactttgtgtgaacc

SEQ ID NO: 86660 - DNA, 270 bp, Glycine max
  Clone ID: 700952336H1
agctgtgttgcgtgttgaagagggaagaagatgtcgggtatgggagacgggtacgtgggcaccgcccaagacgcggtgaggattcgacggttggagaagcagagagaagcggaggttcgcaaaatccaagagctcaaaaccaagtcgacctccgccaagggccaacccggtctcctccaattcggttccagcacttccgagattcttgagactgcctttaagaaggaaactgtgggtttggtcactagagagcagtatgtagaaaagagg

SEQ ID NO: 86661 - DNA, 267 bp, Glycine max
  Clone ID: 700952337H1
gaaagataaagcattccatagcctcccataaaaatgaagaatactatcttctctgctctctttctactttgtgccttcaccacctcatacctaccttcaaccaccgcggtggtcgataccgacggtgatattcttcagaatcctggcacatactttatcttgtccgtttttcgacccggcggcggagtagaattcgccgccactggaaacgaaacttgccctctcactgtcgtgcagactctcttcgggaggggctttccagcaata

SEQ ID NO: 86662 - DNA, 271 bp, Glycine max
  Clone ID: 700952339H1
gtcaagttgacttgtctaagatattgaaccgccaagcttatgataccgcacgtgccacacaattagaggcattgttagaagaaagtcgttctttgtctaccaaaaagcttcatgatagtgacgtgagaaccatatgcatttgtgagacacggatgattaattttgataagactcggatatggcttgaggagattctctgggagaagaaatatgatatggatgtataccgttgcaaaggagtgttaagtgttcaaaattctgatcaacttca

SEQ ID NO: 86663 - DNA, 272 bp, Glycine max
  Clone ID: 700952340H1
gtcaaaactttcatctttgtcatccacttaacccaggtgtaaaaatgtcagcagtgaacatgtccactatgagacttccaagagcttccttgtctggaacaacaccagctaggagatcatgtgctcttacaaagagtccatcatctttgaggtctgtgaagaatgtgtctaaagtgtttggatttgaatcatcttcctttagagtgtcagcaatggcggtatataaagtgaagctgattggaccggacggtgaagagaatgaatttgaagcc

SEQ ID NO: 86664 - DNA, 254 bp, Glycine max
  Clone ID: 700952341H1
gagggagtccactctctccaatcccgcaaaatcacccctcatcgacaatttcaaaggcctcggtgtcaatcattggttaggagatctatacgatcatcaaagtttggtgagtgctataaagcaggtcgatgtggtaattgctactgtaggtgacctgcagatatgctgatcaagataagatcatttctgcacttaaaggagcatggaatgttgacaagttctatccatctgagtttggtaatgatgtggtccgg

SEQ ID NO: 86665 - DNA, 269 bp, Glycine max
  Clone ID: 700952342H1
cgagctcgagaattttatgaggacaatgacaatggagcccacacttcccatgttgaaaagagttcctgatgtctgtcagaaaaatgagtgcccaagattgggagaatggattgcagaaaaaattaatgaattcaaatactaagtaatttcaacaagcagcgatgggagctgatatttgtttcatgactttcattataaaggccatacatcagatggcaaatatatgcaatggaatatgactatgatcaaggtcctgtctgtaatgatga

SEQ ID NO: 86666 - DNA, 267 bp, Glycine max
  Clone ID: 700952343H1
gtgctctgctcgtgcctctagggttatcatatctccatttccatttcctctctctcagtttccaagaatcttaagctatgggaaagtcttacccaaccgtgagcgctgattaccagaaggccgttgagaaggcgaagaagaagctcagaggcttcatcgctgagaagagatgcgctcctctaatgctccgtttggcatggcactctgctggaacttacgacgtgagctcgaagaccggtggtcccttcggaaccataaagcacccct

SEQ ID NO: 86667 - DNA, 266 bp, Glycine max
  Clone ID: 700952344H1
caagaagggaaaaaaatattcgaacttcaaagggaaatgattcagcttacaatgacgctctttaagtttgctttcattccaggttacaggtttctgccaacgcataccaacaggaggatgaaagcaattgacaaagaaatacgagaatcacttatggtaatcatcaaccgaagattaaaagcaatcaaagcaggggagcctactaacaatgacttgttaggcatactcttggaatcaaattacaaggaatctgaaaaaagtagtgg

SEQ ID NO: 86668 - DNA, 269 bp, Glycine max
  Clone ID: 700952345H1
ttctcaggtcccaaccgcatcaagcgtcgctgatccatcttcttctgtcgttgcatctcttgctgtccccgaaaggacgtaccttatccaaatctctacatatcatatcttccccaaaagctacgccctctctctctctgatctgattcaattgaatgggccttaaccttttcgttctccctccatggcaatggctaactctttctctgccgtgatcctccaccgctctcccatcaccgccctcgatcttctcctcatcttcctccata

SEQ ID NO: 86669 - DNA, 267 bp, Glycine max
  Clone ID: 700952346H1
aaagaatggctgccaacacattgatgagtactgctatctcagccttcccatctctcctttcttcctcaaaatccagatttgccaccgcagttcctctttctagctttggtgtcaccaatgcctcttcttctcgcttttctatgagtgctgactggatgccaggccagcctagacctccttaccttgatggttcagcacctggtgactttggattcgaccctcttcgtcttggtgaagtaccagagaatcttgagaggttcaaagagt

SEQ ID NO: 86670 - DNA, 267 bp, Glycine max
  Clone ID: 700952347H1
ctcgcttctggctcccgctgtgtgctctgcttcacactactgtatctcatccactccctatcgctgcaatttgggataccaaagatacccgtagatcatcagagaaaaattcaattgaagaagaggttgaaacttaaactgctgaaacgcaaagattttctagcaaaaaatggggaagaagagaaagcacagtgagacaactcatgatgaggcacagccccaaaaggaagatgtcgctccagggagaccagctaagacccttttggg

SEQ ID NO: 86671 - DNA, 271 bp, Glycine max
  Clone ID: 700952348H1
actttcagagagtgagctccagcaatcgcaatgggttggatcggcgagactgttgattccgtcaaatctcttcagatccgtcaggtcctcagccaggctgtgagcctaggcatgattgttacgtctgcactgacaatatggaccgcattggtgtgcgttactggcagtgaatctcccgttgttgttgtcctctctggaagcatgggacccggattcacgcggggagacatcttgttcttgcacatgagtgaagatcctattcgggcagggg

SEQ ID NO: 86672 - DNA, 251 bp, Glycine max
  Clone ID: 700952350H1
ctccctttcattttctctgcatctgtactctccaaaatgccgtccttagaggaggagctcttcccttcaaccccaggcaagttcaagatcgagcgggcccaccacatgaaccgccagctctaccgctgcttcgcctccaccagcaacatgttcctgtgggccctcctttttaatcgccctaacggttccaaatccaagcttccagggcttcgttgattccggaagcggtaacttttcggcctcctggggcg

SEQ ID NO: 86673 - DNA, 191 bp, Glycine max
  Clone ID: 700952354H1
gttccacaacattgatgagcagcagaatttttagccctggcctgatcatcagcaacaccagttttattgattaatgaaactggtgttgctgatgatcaggccagggccaaaaatcaataaaaaaaatctcaaaattgttgattttggacactataaaatgatttgaggttgaagaaaagttatgaaaagta

SEQ ID NO: 86674 - DNA, 269 bp, Glycine max
  Clone ID: 700952355H1
ggaaaagtatttatccaaacctataaatgagctggacctttctaactgcgaccagtgcactcctagttaccgcctcttaccgaaaaattacccaatacctgtagctagccagaaaacagaacttggtgccggagtgttgaatgatcactgggtgtctgtcacttcaggaagtgaggattattccttcaaacatatgcgcacaaatcagtatgaagagagcttgtttagatgtgaagatgacaggtttgaacttgacatgttgttagagt

SEQ ID NO: 86675 - DNA, 270 bp, Glycine max
  Clone ID: 700952356H1
gtggttactctaccaataggaacccctccacagcatcaacaaatggtgttggacacaggaagccaactctcatggattcagtgccacaacaaaacccctccaacggcgtcgtttgatccatcactctcttcatccttctatattcttccttgcacccaccctctctgcaaaccccgcgttcccgattttaccctcccgacaacctgcgaccagaaccgcctctgccactactcatacttctacgccgacggcacctacgccgagggcaac

SEQ ID NO: 86676 - DNA, 269 bp, Glycine max
  Clone ID: 700952357H1
ggcgcgtggcctttaattggtcacatccacctcttaggtggctcaaaaccaccccatgtcacgttgggccacatggcggacaaatatggtcccgtcttcaccttgcgtctgggtgctcaaaaaaccgtgggttgtgagcaattgggaaatgggccaacagtgctttaccggccaacgacaaagcgtttgctagccgtcctaaatcagtgtcctttgaattgttgggatacaactattccatgattgggttcatcccttacggttcttat

SEQ ID NO: 86677 - DNA, 265 bp, Glycine max
  Clone ID: 700952359H1
ttaaagcatcaaattttggtccaattgcaactgcttaaatatttttactatacaccatgtttgctttgggaggagtgtaacaagtacctgatgcgcatgtgtttagtaaaagaatataatagcattactactattatatttgttatgtgtctatttgatttcacatccattctattaagaaattaattttgagtttagaatgaaaaaaaaaaaaaaaactgcaaaaaaaaaaaaaaaaaaaaaaaaaaaaaaaggggggggcccc

SEQ ID NO: 86678 - DNA, 264 bp, Glycine max
  Clone ID: 700952360H1
gggtagtagaattgtagaagcttcacttcactctcatcaactcagagttgcatagaaatttgtctctatttttgttattttctctcttctttgtggacttttagcaactatattgtttccaatgtccaagatgttgggagtgtttgtgggacttttgttggtggggttggctgcctctgccaagtttgatgaactcttccagcccagttgggctatggaccatttcatccatgaaggagaactcctcaaactcaaacttgataa

SEQ ID NO: 86679 - DNA, 254 bp, Glycine max
  Clone ID: 700952361H1
attcaacttaagagatcaatatggccaccaccactacccagcctccctctaatatctgttttttccttctgttgttgcttctagcacactttcatttgggcataagccaacttgagctgaattactactctaaaagctgcccaaaagctgaagagatcatcaaggaacaagtcacacaactatataacaagcatggaaacactgccgtttcgtgggtcagaaatcccttcacgatgcgtgggttagtcatgcga

SEQ ID NO: 86680 - DNA, 271 bp, Glycine max
  Clone ID: 700952363H1
cactctcccacttcaaaattcatgtctccctcttccctccacgcgctcctcatcattctcttcctaggttccgcacacgcgctcaaggtccccttccgagtcaacgatgttctccccgttctcccccacggaatctcctggccgctcctcaacaacctccacagcgccgtcgacttgctcccttccttcgtcgccgccgtccctcccgataacgattccgttcagtggagagccgcatgcttttacgataatcaagcctccctcgaattca

SEQ ID NO: 86681 - DNA, 254 bp, Glycine max
  Clone ID: 700952365H1
ctcgggaaaatcacagcgacgctcaggaaaaactctaaactgtgaaaaaaccactgcgatcaatggcaacgatcaaggccgtgaaagctcgccagatcttcgacagccgtggaaatccaaccgtcgaagttgacgttattctcagcgatggaagcttccacagagccgccgtgcctagcggtgcttcaacaggtgtttatgaggctttggaattaagggatggaggctcagactacctcgggaaaggtgttctc

SEQ ID NO: 86682 - DNA, 271 bp, Glycine max
  Clone ID: 700952366H1
ctttctctacttctttccctttccccaacccctcatacgttactctttaaatacgcaccacatcttcacgtgcctctcggttcttcagtccaaacaatggccatggttgagctctggtggattacgtgctttctctaactactgttttccacacttaacgaaccacaacacagtgagaaagacataatggcggtggagtacacatgctgctcaacggccttcttcgttcacatactggtcatcgtgctgctcgtgcttttcgcgggcctca

SEQ ID NO: 86683 - DNA, 272 bp, Glycine max
  Clone ID: 700952368H1
ggcatacatgcagcgagatgctgcaattgcagaacgtaataatgcaatgttggaacgagataatgcaattgcaactcttcagtatcgtgaaacctccttaagtagtggcagtatgccatcatgccctccaggatgccaaatttcacgtggtgtcaagcatgtacatcatccccaacaacaggtgcaccatatacctaacatgggtgatgcctcttacaacacaagggaaatgcacacaacggaggtcctccctgcagcccccatcccttctg

SEQ ID NO: 86684 - DNA, 268 bp, Glycine max
  Clone ID: 700952369H1
cgtgtttgagagaaaggttgagctatagcctaaagggagagacacataaatagtttctactttctattcatagatagatggctggcccaattatgagacctcagattgtgctatttggctcctccataattcaaatgagcttcgacaatggtggttggggtgctattctagctaacttgtacgctaggaaggcggacatcatcttaagaggatactctggttggaattcaaggcgggctttggaggttttggatgaaattttccccaa

SEQ ID NO: 86685 - DNA, 270 bp, Glycine max
  Clone ID: 700952370H1
gcagaaagcaagctcatcctagagttttaaaaatggcagcagcctcctccatggctctctcttccccatccttggctggcaaggccgtgaagctgggcccatcagcccccgaagtcgggagggtcagcatgaggaagaccgtcaccaagcaggcctcctccggaagcccatggtacggcccagaccgcgtcaagtacttgggcccattctctggcgagcccccgtcctacctcactggcgagttcccaggtgactacggctgggacactg

SEQ ID NO: 86686 - DNA, 267 bp, Glycine max
  Clone ID: 700952374H1
aattagttcattctctttgcgcagttccctacctctcctttcaagatgcagatcttcgtcaagaccctcaccggaaagaccatcacccttgaggtggaaagctctgacaccatcgacaacgtcaaggccaagatccaggacaaggaaggaattcccccggatcagcaacgtctcatcttcgccggaaagcagctcgaggacggccgtaccctcgccgactacaacatccagaaggagtcaacccttcaccttgtccttcgtctccgt

SEQ ID NO: 86687 - DNA, 264 bp, Glycine max
  Clone ID: 700952375H1
agattttatccaattgaaattttaaaaatgactgggataaacttaagaattcaattattgaaattgaataagtaaacaatttaattggattggtcgaatggtatcaaaaaaatggagtactaactcccatttcttatttattattgaattaaccgatcaacttgctttgttatcgaacatttctttttgatttcaaaaattttccggaaaaaatttgaatctatttttatatgcgaatcaatcctactacttctggtcctgagg

SEQ ID NO: 86688 - DNA, 265 bp, Glycine max
  Clone ID: 700952376H1
tggtggttgcaatgatgcttatatttcttctaatttctacgcaaatggagagcgttgagcccgatgctgcagattgcttggatggttgcactactgcctgtgttcaaagcgactcgaggcttcaagcacggtgtgatcgcaagtgcagcattagatgcggtccagattccacaatcaaggaggacatgggttgagtatgtaaagtcacagcgcaagcaagcagtgtctgcttgaccaacaccgtgtcttttttagtccttgctta

SEQ ID NO: 86689 - DNA, 267 bp, Glycine max
  Clone ID: 700952377H1
attacatgcagtgtagccgaaggcaatgagttccaaagagagttgcagaagtgaacttcgcattgcgatccgccaactcagtgatcgatgtctctactctgcttctaaatgggctgcagaacagttggtgggtattgagcaagaccctgccaagttcactccctcgaacacgagatttcagcgtgggagttcgagcattcgcaggaagtacaagactcacgagatcacgggatacccaatcgcgggtgtttcgtatgttgccacgct

SEQ ID NO: 86690 - DNA, 266 bp, Glycine max
  Clone ID: 700952379H1
gctgcctgtcaaaactatgatttaccccgagccaggattcgaactacaccgcaggcaaggagacacccaaactgctcaaatgtacacagatgttggagtttattatgcaccaggtcctgttcttaggggtgaggtatttgatggggcagaagcagtgcgtaaaatggagaactggttgattgaaaatcatggttttcagccacagtatgctgtgtcagagctgtccgagaaaaacttctggaggatgtttgatgctggtttatatg

SEQ ID NO: 86691 - DNA, 272 bp, Glycine max
  Clone ID: 700952381H1
tggatcagtttttgtggaaggtgttgcctttgcttacaatccttgtttcctttggagtgttcttctacttgcaggattcttacacagcacagttatttcctctcataaagttaccgcgggataagtgcagccttcttccccatcgccacttctggatatccagcaaacgtattgtgaccccacaagggatcatttctggttcagtggagataaatgatgggacaatactatctgtcgttgagggacatgctattcaggggaagcctaagcaa

SEQ ID NO: 86692 - DNA, 270 bp, Glycine max
  Clone ID: 700952382H1
attttgttatctcttcttccacaaactttcggagttttctttcgttaattaataaaatctttgcttaattaatttgtccttcctggaggggcaattaattaattaatctctggtgagtatttataaatatggagagcctggaagaaagagtgtttatgttcatggatgaacaatattatttttccaattccaatgaatcagagctgcatatgcatcatcatccctctgtgtctgtggagaacatatcgtgggaaaacaacaccgacttcg

SEQ ID NO: 86693 - DNA, 217 bp, Glycine max
  Clone ID: 700952385H1
ggagggtatacctacgtgtgagcacaacacttggctccacatcagcgtgcttaccacgtggtgacatgagaaattctaggagttgtgtattgaagtgagcaagctgctgctggtgctggagtttagggatgagggtttattttattggcagggttacatgagtttgtgatgatgtgttattgtgtttctttaggtttgaataaatgatatttacttt

SEQ ID NO: 86694 - DNA, 262 bp, Glycine max
  Clone ID: 700952387H1
cttccaactcgccctcgactcacttccttgtccgattccgccaacgaggccagtgaatcagatctatctgcttcttcgtcatggccaccggacaactattctcccgcactacacaggctttgttttacaactataagcaacttcccatacagcggatgcttgattttgacttcctttgcggcagggaaacaccatcagttgctggaataattaaccctggttctgagggatttcaaaaacttttttttggtcacgaggaaat

SEQ ID NO: 86695 - DNA, 109 bp, Glycine max
  Clone ID: 700952388H1
cttctattagaagtttgtggccattttttttataagacaaatcacattttgaatcaacccgaacttttgatttgccatctatgatgtcggccaccgcaaccagcctagt

SEQ ID NO: 86696 - DNA, 268 bp, Glycine max
  Clone ID: 700952389H1
gcagcagggagctctgccgcctccaacaaaacagagttcagaacacaaaccctcgaaccgaacgtttttgagggttgatagagcacgatggttcagtacaattttaagaagattaccgtggtgccaaatgggaaggatgtggtcgacattatcctctctcgcacccagcgtcagacaccaaccgttgtgcacaaaggatatgcgatttcacggctgcgccaattctacatgcgcaaagtgaagtatactcagcagaattttcacgaca

SEQ ID NO: 86697 - DNA, 264 bp, Glycine max
  Clone ID: 700952390H1
atcatgttacccagcagtatcataaagccagaaaatgttggtttgtctctctcatatggcttgtcattaaatgccgtgatgttctgggctatatacatgagctgtttcattgaaaacaaaatggtatctgttgagaggatcaaacagttcacaaatattccatcggaagcttcatggaacattaaggatcgcctgcctcctgcaaattggcccggggaaggccatgttgatatcaaagacttgcaggtcagatatcgtccaaac

SEQ ID NO: 86698 - DNA, 264 bp, Glycine max
  Clone ID: 700952391H1
gaacactgcactgagtgctgctttgaatacacaatttctctttcaaattggtatcttcactgctgtgccaatgatcttgggcttcattcttgagcaaggtttcttgaaggccattgtcagttttgtcacaatgcaattccagctttgcactgtctttttcacattttccttgggtacaagaacacattattttggtcggacaattcttcatggtggtgcaaggtatcaagcaactggccgcgggtttgttgttcgccatatcaa

SEQ ID NO: 86699 - DNA, 267 bp, Glycine max
  Clone ID: 700952393H1
ctaattccgaccatggaagccacggcctccgcaatgagcttcgcccttccctcaacaaaagcccaagcccaagcccaactcctgacccggcccaccaatccattcaccattccctcccgcagcccagcccaccgccccccgccgcgcctccccaccatccgcgccgcaattccccgcacaaagaaagaggcaacggtggagactgtgcgggagcagctcgagaactgttacctcctcgccggcatcaactacaagggcttcacggtg

SEQ ID NO: 86700 - DNA, 265 bp, Glycine max
  Clone ID: 700952394H1
cttgttcttctttctctattgtctatagtcatctccattgttctcttcattacccacacacacaaaagaaacaacactccaagaggaccaccaggtcctccacctcttcctctcatcggcaaccttcaccaactccacaactcatccccacatctctgcctatggcaactcgccaaactccacggtcctctcatgtcgtttcgcctcggcgccgtgcaaaccgtcgtggtttcatcggccagaatcgccgaacaaatcttgaaaa

SEQ ID NO: 86701 - DNA, 213 bp, Glycine max
  Clone ID: 700952396H1
caccgaccaggttctgtcaattctatttcgcgaattgaccaacaaccaagagaaaatggttttcctcggcaacaacgagcagaacctggtggtggctgcgccgaggaagctatgcggttacatgccggaggcgaagaaagtggcgttgcagaagctcgaggacgtgctactggagccgccaagagcgtcttcagggaagtcacgaaagtactt

SEQ ID NO: 86702 - DNA, 269 bp, Glycine max
  Clone ID: 700952401H1
atccttgcaacacacattgtcttgtcggcaaaatcttccaccaacaacacaattcctggcaggctcaaacattctttctcactctccttcccttcccaaaacctacagccactccttaaaccaaaacgcgttatcccaaaagcttttttttctgcccctcaaattcaaagccaccacaaaaccacgtgctctcagagcggttctctcgcagaacgctgtcaaaactcggtggaggacacaaagaacgctcattttcagcactgtttcac

SEQ ID NO: 86703 - DNA, 268 bp, Glycine max
  Clone ID: 700952402H1
aaagaaaagatggaaaccatttccaaatttccctgttcacatcaacctgtaagatccattagtttccctcctagggtacaccccgtttctcaaagagttgaagcacttctaaaccacctaaaacctcatcattctcagcctatctcaatcactaactggtttagactctgacaattcagagcgacttagttgtgcttgctgagttgtacaactgcatggaagaacttttccattctccacaaaccaaacaaactcttctacgctacca

SEQ ID NO: 86704 - DNA, 265 bp, Glycine max
  Clone ID: 700952404H1
aaactttttgaaacatttcttctgaattttagttgtcaacaccacccatttttaaagctttgaagcatcatcatcgctgtgttctagttagcttccaataactaatggtacttttgacagagaaacttgcaaaacgttacttcaacttcaagctggagaatcgccaccatgccattacacatcctcaaccagaggagttatcatcttcacttcttgcgtttaaatcctatgtgtccaaattcatttgaccaattagcattggatt

SEQ ID NO: 86705 - DNA, 256 bp, Glycine max
  Clone ID: 700952405H1
gaccagaattttatgatccccgtgttaggttccgcgatattgtgttgttagggttttcaattcttatcaaaacctgcttgatcgaacagaaactatcaatgaagggggaagtgcagcttcagcctccagcggttatgcaaaaccctagtgattcggaccctttgctccataaccaggaggaggaggaggaggatgagtcaccgggaagctctggtgagatcaagaatgaggaagaagacgttgaggctggattact

SEQ ID NO: 86706 - DNA, 89 bp, Glycine max
  Clone ID: 700952407H1
caccaaggtgcaactttgctgttgtgctagggctcgccctcagtgagtgataattttatttacctttttggtcattccacacaacatac

SEQ ID NO: 86707 - DNA, 260 bp, Glycine max
  Clone ID: 700952409H1
ctatagtaaaaaaaggacattcattcatctatggctacccttattgctcccagcaaccactctccccaagaagatgctgaagctctcagaaaggcttttgaaggatggggaactgatgagaacactgtcatagtaattttgggtcatagaactgtgtatcagaggcagcaaatcagaagagtttatgaggaaatttaccaggaggatcttgtgaagcgcctagagtctgagatcaaaggagactttgagaaagccgtgta

SEQ ID NO: 86708 - DNA, 258 bp, Glycine max
  Clone ID: 700952410H1
tcacaaccagtgatggccgtacagctgtgtcctacaatgttgcccctgctggttggtcctttggccaaacctacactggtgctcaattccgctagagagggccttaataattgtccaacagttgaagttccaaatatttagatacactacatatagtatatgctataatttctcaatttaagtgttagtatatgactccaaaaaaaagactagtatactaaggtattaatatagtatgctactggtggaggagggggg

SEQ ID NO: 86709 - DNA, 229 bp, Glycine max
  Clone ID: 700952411H1
ccacattcaaatccaaatggccctttacattacactaataattggcctcctagtaaacaccctagtactctataaatagcatttgcatgcaccttagtcttcaccaaaatactcctcttggcatcttgtgttgtgtccctcttttaagctatttccttctcttaacacaattggttgtgccaattgccatagtcaccaaccaattaacaaaggtatatatatcatcata

SEQ ID NO: 86710 - DNA, 256 bp, Glycine max
  Clone ID: 700952412H1
ctttacttcattttaggaaatgggtcttaaacaactgcggtcaacccttgccaattttgaattctcgtgtaactgaaactgcttctgctgcggaagcttctttctttgggggccacaaggattctcgtgtaactaaactccaatgatgaacaaaactcttctcacttatttctacttgttcatctacattttgctttcttctggagtcattttgtacaacaaggttgtcactcctgttaaaatgacatttgaaatt

SEQ ID NO: 86711 - DNA, 258 bp, Glycine max
  Clone ID: 700952413H1
cccatccaatcctcacatgcatgctgtctctgccaaagtgccaagtcacataacatttccattgttaccattctttctttccatcacaaccacttatcaagcctctgatcctcactttctctcacacaaaaacacactcaccatgggatatcggaaaccaatggtaacccacttcctccgatgctggcccaaatccacaaaactcgaagaggagccttcttctagttatttgcggcttgctattactctcttccctgg

SEQ ID NO: 86712 - DNA, 255 bp, Glycine max
  Clone ID: 700952415H1
caaaggttgaagctattattggaaagaatgaagaggccattatgaattttgaaaaggcccgttcaattgatccatacatcataacatatatggatgagtatgcaatgcttctaaagctaaagtctgattatccaaagctgaacaagttagtgcatgatttattgaatattgatcctgcaaggcctgaggtttttatagctttgctgtttgtgggaaagggaagatgagaaaaaagcttacaatatgtgagcagag

SEQ ID NO: 86713 - DNA, 261 bp, Glycine max
  Clone ID: 700952416H1
aactaaacttcaattataattctcagacaccacttgctcatcattataccttcctgtctacgtgaaataataataatacattaaaccaaaccaatgtcggactggtactttttctacccttttcctttttctccctaaattcttttcaaaattttcttttgctttgcttgcccaaattcctcttgccagatcccaacttcacagcaaaccgtgaatctgatcaagacccaccttccaaaaatgcaacttgggaaatgggtt

SEQ ID NO: 86714 - DNA, 135 bp, Glycine max
  Clone ID: 700952417H1
attatttttctgtgtttccatttcaccactttctccctccgatttctccagaacagcaagggagaatcaattcctcatcgctgcaattcttctttcactctctagtttctcttctttctttcttccaacctcttc

SEQ ID NO: 86715 - DNA, 154 bp, Glycine max
  Clone ID: 700952418H1
gagaattttgacttcacgcctggaatgatctccatcaatcttgacctcatgagaggcggaaacttcaggtaccagaagactgctgcttatggacattttggaagagatgatccggatttcacatgggagacagtgaagatactcaagcctagtg

SEQ ID NO: 86716 - DNA, 243 bp, Glycine max
  Clone ID: 700952419H1
ggactacccagaaagggtgggggaacctccgtgtcagtattatttaaagaccggaacctgtaaatttggtgcatcttgtaaattccaccatccaaaaaatggaggtggatatttaagccaagctccactaaatatttatggatacccgttacggctgggtgaaaaagagtgctcctactatttgaaaacggggcagtgcaaatttggtatatcttgtaaattccatcatcctcaacctgctgg

SEQ ID NO: 86717 - DNA, 154 bp, Glycine max
  Clone ID: 700952420H1
caaagatatacacatatagggagaggctgaaggaggggcatcagatccctactttgtataaatggggttgtctttctaaacaaccccatcacatcattaagagggggggatcgatccttgatttgtgaatttgcttgcattagcaagatcatat

SEQ ID NO: 86718 - DNA, 259 bp, Glycine max
  Clone ID: 700952422H1
ctttcgttattctcttattcatccttctcttctgaataatccagatctctttctgcccttttctccgtcacgcttttcgtgaccggatctgtatggatttgatccagatctacacgccgatggtggttttggccgggtctttcatagatctggtgcgtagaggctcagatctacggtaccgaggtacaacagagaatcgatgacaagaacgcagatccgacggtagatccagccgattccgcttgttcgatcgctacag

SEQ ID NO: 86719 - DNA, 258 bp, Glycine max
  Clone ID: 700952423H1
gcccaatctgtgagtaatgggagtttgcctgtgatgtttggatattcacctgttcagcttcctatgttggagaaggacaactcatggggtttggtttctcgtcctcaacagttacacccttcctttgttggcagaggtccaactaactcagctgcactacaagtaatctcaaacaatatatccgaggccatgccttatgaaggaaggccgttagaacgaaccaaaggagacggtaaacagcgtgtcactgaagaaggc

SEQ ID NO: 86720 - DNA, 259 bp, Glycine max
  Clone ID: 700952424H1
cccaaaccatttccattcactaccacaccaaccgcttcttacctcaacccgatgtcttcattcgcacttcccacggaacacgcattccagcccacgccggcattctggcttccatgtcccctgtttttgacaactttatagatcgcccacgtaagcatcggagctccgagagaattatccaaatccacggcgtcccctgcgacgccgtcaccgccttcgtcggattcctctactcctccaggtgcacggaggaggagat

SEQ ID NO: 86721 - DNA, 258 bp, Glycine max
  Clone ID: 700952425H1
caaatatgatgatgacagtcacaaatatgacgatgaagatgaagttgatgaagagtatcgagaggatgagcatgatgaccttacttcctcctacaaatctgattctgataatgaaccagacttgtcagataatccttcttggttagagaaaatacagagaactgtgcggaatatttttcaggctgttaatttattccaggctccagtgaaccagtcagatgctgctcgtgttcgcaaggaatatgatgaatcaagtgc

SEQ ID NO: 86722 - DNA, 261 bp, Glycine max
  Clone ID: 700952426H1
gttgcagctctagctagggtttcgcaagtgcgatcgaagaagaacaacgacgatggcgatggctgcagctctgcgtcgcgaaggaaggcgtttgatccaaccaatcaacgccctccactcttctctcaaattcctccctcatctctcaagaccaagcccctcatggcgcgcgctccatttccactcaagttgtgaggaaccgaatgaagagtgtgaggaatatccagaagatcaccaaggccatgaagatggttgccgcgt

SEQ ID NO: 86723 - DNA, 260 bp, Glycine max
  Clone ID: 700952427H1
caaaagagacactaacaaaacaaaccccgtgaaagcaaagcaccccaccgcgctctttgcctaaccgactcactcccatggaatccgatctaaacgacgccgtttttcccgaagaagatctcgacgacgacgacgaaactccagaggatgaagaggaggaggaggacgacgacgtcttagatgacgatgaaaccgaaccccctccctccgtcatcgccgtcgcgccgcccgcttcccaaacgctcgacaccgcgttaatt

SEQ ID NO: 86724 - DNA, 273 bp, Glycine max
  Clone ID: 700951821H1
gaagcctttaaccatgcgggaaacaaacattacaagctaggcatcaaccattttgctgatctcacaaacgaggaattcaaagccataaatagattcaagggtcatgtgtgctccaaaataacacggacacccacatttaggtatgaaaatatgacagcagtgccagctacattggattggagacaggaaggagctgtcacacccatcaaggaccaaggccaatgtggatgttgctgggcattttctgctgtggcagcaacagaaggaatcacc

SEQ ID NO: 86725 - DNA, 267 bp, Glycine max
  Clone ID: 700951823H1
tttgtagtgattattagaggatttgatcgttaacaatttctcttcttatttgtttaatgtttttggtttcttaggtgaattattcaagaggacccgacaatcccacaaagcagaaagagaggttgttatgttatggcgggcaaaggtgttggttcagtggctaaggcagtagcagaatatcagtatccttggcgtgagaagttggcgaaatataaggatgagtttgctaagggtgtgtggggatactgggagctgggggcatggaag

SEQ ID NO: 86726 - DNA, 272 bp, Glycine max
  Clone ID: 700951824H1
cgctgagttgcgtcgtctctctaacaaaacaaacaaacaaaaaaaatgatttctgcgatttcgtgggtgcccaaaggggtttcgaagtcggaacttgtcgtggctgaacctcctcccgaagaggaaattcaagagataatagccaaccacgcaaccaaaagtggagacagtgacaatgaagacgctaacaacgatgacgttgtggcacaagcattaaccgtagcagacgcattggcaaggcctccactggaacctgcgacgaaataaccttg

SEQ ID NO: 86727 - DNA, 271 bp, Glycine max
  Clone ID: 700951825H1
ctcccctctcaggtttttgtggataagattgagctataatggctgccaggagaccgggtttgattgctttgtttgatgttgatggaactcttacagctcccaggaaggtggtcacaccggagatgttgacattcatgcaagaactgcggaaggttgtaactgttggagttgttgggggttctgaccttataaagatatcagagcaacttggcagcacagttaccaatgactatgattatgtattttctgagaatggtcttgtggctcacaa

SEQ ID NO: 86728 - DNA, 269 bp, Glycine max
  Clone ID: 700951826H1
ttaagcggttacacctcacctatgattagaacaagtggttcaatagacaacacatttggaatctttggagagatgatatatgcaagggtatttggtaaccacgtgtcaaacctccatacatatgccaatctttcggggaccagtaacccaagaatgagaagacatttaatgcaagttgataaatcactcagcagaataagttgtttcctcctttgctgcctagttttgtgtctgctcttattctgattgctatttcgttttcatcctta

SEQ ID NO: 86729 - DNA, 269 bp, Glycine max
  Clone ID: 700951827H1
gaggaagctccacgagtcctagagaggcatttcttagatttaaggaaaaaatatggggcagtattggatgttgatcttgttaacaagcatggcggagaagggcgactgtgtgaaaaatttggtgatgcatcgcagcatgtggctggtaatgatgtaagatatctgcactttgattttcaccatgtctgtgggcatgttcattttgatcgtctctcaatcctgtatgatcaaatttcagatttccttgagagaaatggatatcttctgtt

SEQ ID NO: 86730 - DNA, 211 bp, Glycine max
  Clone ID: 700951829H1
gtactgaataggaaatgaacctgtgtaaaattatttagtgtctattttaagtttcagtttaccatggtgtccgcacaaaatgttaacaaaaacaaaattataatttatttttttatgtaataacatcaggatactataaaattgacattgtgaaaaaaaaaaaaaaaaaaaaaaaaaaaaaaaaaaaaggggggccccccaattttttccc

SEQ ID NO: 86731 - DNA, 265 bp, Glycine max
  Clone ID: 700951830H1
tcaagatgcagatattcgtaaaactttgaccggcaagaccatcacccttgaggtggaatcctccgacaccattgacaacgtaaaagctaagattcaagacaaggaagggatcccacctgaccagcagagacttatctttgcgggtaaacaacttgaggatggtcgcacccttgccgattacaacatccaaaaggaatcaaccctccatctcgtgcttcgcctcaggggtggcatgcaaatctttgtcaagactttgaccgggaag

SEQ ID NO: 86732 - DNA, 275 bp, Glycine max
  Clone ID: 700951832H1
aatcattcttcgctccttctctttcgattaacatggcatctcatttactcaatcactcgtccaagatgagaaatgcttccaagttgctgcaccacgaacgcgctcttttggttcgttggttttccggcgatgctcaatcctctctcaaccgaaaccgcgatgtgtggaaaactcaattccacgagtcttcaacaacaagaagtgtctttgaaccggcctccagctttaataaacgttcatttggtatgcagaagagaaacatctccatggctacc

SEQ ID NO: 86733 - DNA, 281 bp, Glycine max
  Clone ID: 700951833H1
gtataaataatgtttgcgaatattgattcacaaatcacaaccagttctctatgctgaattcactagcaatgtattttccacatgtaagagtgaaaactagaaaatctgtgaaccataccaggcactacacattactgattagtagaattcaactcagcagattatatattgaaatctcccagagtcagagtacatggaggaatgatattccgccttggttggtatctagggaatggcacaccaaatactggctgcacaccatattctagttttctccttac

SEQ ID NO: 86734 - DNA, 171 bp, Glycine max
  unsure (1)..(171): unsure at all n locations
  Clone ID: 700951834H1
gcgtacgtgagcgcgnggttggggtcgagcaaaagtgagagacacctatttgtgagtatgtgggttgtgttgttccataatcattcttgagatcaaactcaaacgacaatatttgtgtcttgagatcaaactcaaacaataatatttgtgttatctggcattgtgtttttt

SEQ ID NO: 86735 - DNA, 274 bp, Glycine max
  Clone ID: 700951835H1
gcaacaccaccaaggctgctccgccgcgagcccttacggtggtccctcgtatagtggcgcgctcactctcctgcgacggtgaactcgagatcgcgctccggtacctccgcaacgcgacccagtcctctcccctctcatcgacattcaccaacccccaaccttcgacaatttccacactcccttcctcgccctaacccgcagcatcttgtaccagcaactcgcgtacaaagccggcacctccatctacacgcgcttcatcgcgctctgcgggggc

SEQ ID NO: 86736 - DNA, 273 bp, Glycine max
  Clone ID: 700951836H1
gtagaataagagtttaacggaaaattgggatttgggtcaacagctataaaccctaatcaactaactacaatttgcgttgctaaatggaacatcggaacacagaatcagaagctggagatgtttcttcagccacagcagttctccttggagctttagctcctggtgttaatgtccgtattttcactcagcgatctctcccatttttaatttttatactcttttttcattagatttttgtgattttattgttttttgattcagggtcctacatgg

SEQ ID NO: 86737 - DNA, 271 bp, Glycine max
  Clone ID: 700951839H1
ttatcccaaaactaaaaacctcaccctcatctttctctcaactcccttaaccaaaaccaaaacaatggccacccaaagaagccatcattcccctatcttattttcgtccctcatcttaacccttttcgttctctacttcccaagatgccaccacgccattcccaacaaccccatcaaaaccgtcgtcgttttggtaatggaaaatcgctccttcgaccacatgctgggctggatgaagagactaaacccggccatcgatggcgtgaccggg

SEQ ID NO: 86738 - DNA, 268 bp, Glycine max
  Clone ID: 700951841H1
atttattttatttctatggacttgatcacgaaatatatggattgaattgtgtgcctgtttgttctgcagcggtgggagagtactatttaggttctggtttttattacccttgattatctcatgttcattatggactggctttccttattgtgggttttggatttattgtttttgacagtgtagggttctgtcagagttagacttgacttgatgtttctttttgggaaatgtacgaggataactggttctttatacggatggccccgta

SEQ ID NO: 86739 - DNA, 266 bp, Glycine max
  Clone ID: 700951842H1
ggaaaaacaaaaggcatgaggatgtgatgcccccatttttctagttttagttttatccacaagctttgttttgtgagttgaaactatgtatttgtaacctataaacccacacaactccaacctccaccacccctcatatcctcatatctttcactctttttccttttgttttgtccaagacactggcttctggagtttgagtgatagttctacacctatcataatgccattcaggagcattgtgcgtgagctcaaggagattggag

SEQ ID NO: 86740 - DNA, 268 bp, Glycine max
  Clone ID: 700951843H1
atcgagataactagaaacagtgtgatgaaaatgaaggtccttgttttcttcgttgctacaattttggtagcatggcaatgccatgcgtacgatatgttccctctccgaatgaacactggctatggtgcccgtactccggaggtgaaatgcgcaagttggaggcttgctgtggaagcacacaacatctttggctttgagaccattcctgaagagtgcgttgaagcaacaaaggaatacatccatggcgaacaatatagatcagactcca

SEQ ID NO: 86741 - DNA, 257 bp, Glycine max
  Clone ID: 700951844H1
atatcttcccccgttggcctactatgttattagggacattctaaggaaaggtttgagtgaaaatcctaatgcaaagtttatcattacgggtcatagtttgggtggagcactcgcaatcttgtaccctacgatcatgttcttgcatgatgagaagttgctgattgagaggttggaagggatctacacgtttgggcaaccaagttggagatgaagcatatgcacagtatatgagacaaaaattgagggaaaattctatc

SEQ ID NO: 86742 - DNA, 266 bp, Glycine max
  Clone ID: 700951846H1
acaacacaaggccatcatcatggcagctgcttctcctatggcaagccaactcaagtccaccttcactaaaactcttgtagctcccaagggcctctctgcctcttcaccactccacctcctgccttctaagaggcaatttagcttcactgttagggccatccaatcagaaaagccaacctatcaagtgattcaaccaatcaacggtgatcccttcattggaagccttgaaaccccagttacatccagccccttgattgcatggtact

SEQ ID NO: 86743 - DNA, 284 bp, Glycine max
  Clone ID: 700951847H1
ggaattcggatcgaattgaattgaatttattgaactagagagagagagagagagagaagaaaaatggcatatgcacacggttttgctccaattttcaaattgggttttgtgttttcttctgtatcaccatcacaaaaaaaacaccctttggtgtatcctgcatcacactgtggatataccctcaaattctatgatggggtgttatctgccagatcctgcaagtacaaaaacccttcctttgtaaaacaaggttcaataagaggtttcagggctctgaaatcggt

SEQ ID NO: 86744 - DNA, 276 bp, Glycine max
  Clone ID: 700951849H1
gaacggcgtcgacatttccgtcgccgagggcgaatcccccaacagcttgttcaacatcataggcaacttgctcttccccttactcgcattcgcgggcctgttcttcctcttccgcagagcccaaggcgcgcccggcgggcctggcgggctgggagggcccatggacttcgggcggaacaagtccaagttccaggaagtccccgagaccggcgtgagcttcgctgacgtggcaggcgcggaccaagcgaagcttgaattacaagaggttgttgattt

SEQ ID NO: 86745 - DNA, 273 bp, Glycine max
  Clone ID: 700951850H1
gatttgcatcatgttaggttcattaccaatattgccactccctgctcctccctctgatggaaatctaggtcctctccctgagtctcaagtgattgataatgaggagcagaacaaatcaaattctgtttctgttccagcgccggcaacagttgccacccacaccagaacgattggaattatacatccgcctccggacattaggaccattgttgataaaacctcccagttcgtcgccaagaatggtccagaatttgaaaagaggatcattgcaaa

SEQ ID NO: 86746 - DNA, 272 bp, Glycine max
  Clone ID: 700951851H1
gttgtgggctgctccagcctctgtctgtggttggtcttatcttttgctgaaacttgaaattgaatctctctcaagcttcctttcttaaaaggttaggaatttgaagcagaagtaagaactaggaagagatgggagtggatttgagacaagtggtggcaggtgtcctcaccctcacaatgtttgtcatgcttggaaatatgatcaaaagagaccacttcgataattcacttcaagaaaagcttccaggaggatcggaagatgccaactttgaa

SEQ ID NO: 86747 - DNA, 271 bp, Glycine max
  Clone ID: 700951852H1
gtctctctctctcggtctcgctcttcttctcatcaagcacagagttacagactcaccgatcttccgattctctttcgtcttggtttatgagctcgaaggagagacccactcttggtggcacgcggattaagacccgcaaacgaaatattgctgcgccgctggaccctgcagcattctcggatgcagtggtccagatttatttggataatgctggtgatctggaacttattgctaagagtattgaatcttcagaccttaacttttcaagata

SEQ ID NO: 86748 - DNA, 265 bp, Glycine max
  Clone ID: 700951853H1
gcattccaatcgctcccaaaatcttttctaatttgttcataactcaataattctcatcatgggctccttgattgttccaggtgaacatgatcacaaactaaagcttgtttctcttccctttgtatcaaccagtcacctcattcccgtagtagacatagctaggctctttgccattcatggtgttgatgtcaccataatcaccaccacagccactgccgccattttccaaagctctatcgatcgcgaccgtgaccgcggccacgct

SEQ ID NO: 86749 - DNA, 269 bp, Glycine max
  Clone ID: 700951854H1
tgttcacctatgaaaaagacagaaatgtctaccagagatgcctttttggtggagggagagaagaccagtgtgacgctggctggagatgcgtcatgcgtcgtgtgcgtgaacttcacacgctagggctcttcatggggttgcatgcggagatggttggagttgctgtgcatgtggacgacgtggtggtctttggtgattggtgacagtggtcgaaggtgagtttcgatgaaaaggcattgggaaatctgccaaataagggcagagcatcc

SEQ ID NO: 86750 - DNA, 264 bp, Glycine max
  Clone ID: 700951856H1
aatttatgcagtatcaattacaattcgtattgtgcttggttttatgttgctggctctcatttggaagtttgactttccaccctttatggtgcttattatcgctatcctaaatgatggtactattatgacaatttcaaaagatcgtgtaaaaccatcacctctgccagatagctggaagctagcagagatatttactactggagttgtgcttggaagttacttggcaatgatgacagttatattcttttgggcggcatacaaaac

SEQ ID NO: 86751 - DNA, 264 bp, Glycine max
  Clone ID: 700951858H1
atcgaacagcactagaagaagacgatggagaaagaggagagcacggaacagcgaaagcaagcgatgctcgccattatggagctcgctaacatgataagcgtaccgatggcgttaaacgccgtcgttcgcctcaacgtcgccgacgccctctggcaaggtggcgccaacgctcccctctccgcctccgagatcctcccccgcatcctccccggcgccgacggcgcgaacgccgagatactccagcggctcctccgtatgcttgcc

SEQ ID NO: 86752 - DNA, 264 bp, Glycine max
  Clone ID: 700951859H1
gtttttaatcaaggccatgcatggttgttgctgcagagaaagaaattaccattcttttatgactttttgtgattaattgattgtgtaggttgtcaacattgcacagtggaagggatatctgttgtaacataaaattccaattagaggaagctcctcctgtgtaagtctttcggggatttcgacttgcattttgtgtataataaaagatgaagaagttggaggtgcaaaaaaaaaaaaaaaaaaaaaaaaaaaaaaaaaaaaaga

SEQ ID NO: 86753 - DNA, 266 bp, Glycine max
  Clone ID: 700951861H1
cgataactaggaagtttcctaaacatcccttctttcaaaaaaccaatggctttcaagaacttgtccgttcttactctctgtgtttcccttgtgctttccttctttgcaccgaattccatagctgctaacaaccgtgcagtggttcctccagaaaccatttgcaactccaccgtaaacccttccttctgcaaaaccgtgcttgctaatcaaaatggcagcatcgttgactacggtcgaatttctgtccgaaagtccttgtcccagtc

SEQ ID NO: 86754 - DNA, 265 bp, Glycine max
  Clone ID: 700951862H1
atatcactgagttccagaccaaccttgtgccctaccctaggatccacttcatgctttcgtcctatgctccggttatctctgccgccaaggcctaccacgagcagttgtcggtgccggagatcaccaatgccgtgttcgagcccgccagcatgatggccaagtgtgatccaaggcacggcaagtacatggcttgctgcttgatgtaccgtggtgatgttgtcgctaaggatgtccatgctgctgtagccaccatcgagactaagag

SEQ ID NO: 86755 - DNA, 264 bp, Glycine max
  Clone ID: 700951863H1
gtcccaatcccatatgcttgttaactgtggcggaatcaccgtaaccccaaggagactccggacaatagctaagaaacaggtggattacttgcttggagacaacccattgaagatgtcatacatggtggggtatggtccacggtacccacgaaggatacaccataggggctcatctttaccgtcgattgctgtacacccgggaaagatccagtgttccgcaggttcagtgtgatgaattcgcaatcccccaacccaacattctcg

SEQ ID NO: 86756 - DNA, 269 bp, Glycine max
  Clone ID: 700951864H1
cagaggaattcgttttctctgatcgggatctggaagggaagcgaatcgacatgggtttcttggtgacgacgctgatcttcgtagtgatcggaatcatcgcgtgcctctgcaccagaatttgctgcaacagaggaccttctgccaatctatttcaccttactttggtaattactgcaacaatttgctgctggatgatgtgggcgattgtatatctggcacagatgaaaccactcattgtgcctatactgaacgagggtgaataagtctct

SEQ ID NO: 86757 - DNA, 250 bp, Glycine max
  Clone ID: 700951865H1
aatataaaatgatgaattcagattttctttaatcactgtcagctatgctaataataagttattctccaaatactttggactttgaatgttatgttttctcgcagtgtacctatcactaattgagcttagcttcagatcaggccattccaagattgtaaatgcttttacaagagtaaggagtaataagaagggataatataaataaaaaagcattaatattttcatctgttgttaattctcatatatcata

SEQ ID NO: 86758 - DNA, 273 bp, Glycine max
  Clone ID: 700951866H1
ttcctgttgatatatggagcttgggatgcacaattcttgaaatggcaacatcaaagcctccttggaatcagtatgaaggggtagctgcaatatttaaaattggtaacagcagagatatgcctgaaattcctgatcatctctcaagcgaggcaaagaaattcattcagctatgcttacaaagagatccatcagcccgcccaacagcccagatgttactagagcatccctttattcgagatcagtcattaacaaaagcttacaatgtcagaataa

SEQ ID NO: 86759 - DNA, 267 bp, Glycine max
  Clone ID: 700951867H1
ctctacctctcccttcaagatgcagatcttcgtcaagaccctcaccggcaagaccatcacccttgaggtggaaagctctgacaccatcgacaacgtcaaggccaagatccaggacaaggaaggaatccccccggaccagcaacgtctcattttcgccggaaagcaacttgaggacggccgtacccttgctgactacaacattcagaaggagagtactcttcacctcgtcctccgtctccgtggtggcatgcagatcttcgttaagac

SEQ ID NO: 86760 - DNA, 264 bp, Glycine max
  Clone ID: 700951868H1
ctctctctctttttcgcctcattccattttcatctatcaatggctccagtagcagcagcatcttcagattcaatcaagccaagagatgtttgcatcgttggtgttgcacgtacaccaatgggtggatttcttggtactctgtcatctctatctgccaccaagctaggctctatagctattgaagctgctcttaaaagggccaatgttgatccatcccttgtggaagaagtatttttgggaatttcttagtgctaattggggcaa

SEQ ID NO: 86761 - DNA, 266 bp, Glycine max
  Clone ID: 700951869H1
caaaaccctgaagaaagacacagccattgtttgtttactttccattgattgagcgaaagtttgttttttctgcgatcattttccattgggtggaagaaagtctcaacctttagtcgaaagagcaaggatctgagtgagtgagcgatcatgtgtggtggtgcgattatctccgacttcattccagcgggtcccgccggcggggcgcacgcgtgaccgccgacatcctgtggccgaatttgaggaagcggttctcgaagtcgctgctg

SEQ ID NO: 86762 - DNA, 268 bp, Glycine max
  Clone ID: 700951870H1
gtccctttctgaaccacttaaagagtcaacagttgaaggccgagctgctctgttggcaaataacaaaatgcctcatccatttattttgatcaaacccaaggatgagcctgttgatgatataccagattatgagattccccttgcagtgattcctcctgactctccaatgggtgcagttgaaaagcaagatgtccatgacactgttgtatcacaatgcagagatgaagacgttgaacatgaagatgtttttccttcctcaaatgaagaa

SEQ ID NO: 86763 - DNA, 253 bp, Glycine max
  Clone ID: 700951871H1
tatggctcgtcactccttgctcttagccctcctcctcttcgccgccgtggccaccgccgcgatggcgtggcgcgtccgacgccgacgacatcctgatccgtcaggtggtgccagatgttggcgaagccgaagaggaggacaacctgctgaacgccgagcaccacttcgcgcgcttcaaggccaagttcgccaagacctacgccaccaaggaggagcacgatcatcgcttcggcgtcttcaagtccaactccgc

SEQ ID NO: 86764 - DNA, 266 bp, Glycine max
  Clone ID: 700951872H1
aattgttgtaactttttgattcctaaattctctaaaattcgaaattctaatttcgttaggggaaagagattgtttgtgtgtgagtgagtatggctggaaaaggcgagggtcctgctatcggaatcgatttgggaacgacgtactcttgcgtcggcgtgtggcaacacgatcgtgttgaaatcatagccaacgatcagggtaacagaactaccccatcctacgtggctttcaccgacacagaacggttgatcggcgatgcggcgaag

SEQ ID NO: 86765 - DNA, 264 bp, Glycine max
  Clone ID: 700951873H1
agacagtaactactggtagttagttatgtattagaatctgtaggatggcagctatgtaataggagtatatatctgattgtagattgtgtaattgggcagtgtgaagttatttgtagtttgtggacagagaatacactctgtaggagacttttgtctctgggacagcaagtgtattgctgtatagtgtgtgattccagtgttctatatgatattttattatgttatcaattggtgttctatcaccttgggagattgagcttgaag

SEQ ID NO: 86766 - DNA, 251 bp, Glycine max
  Clone ID: 700951874H1
cgcaacaaaaagaaagaatcccaggcgaggagaaagatggaggggaaggagcaggatgtgtcgttgggagcgaacaagttccccgagagacagccgattgggacggcggcgcagagccaagacgacggcaaggactaccaggagccggcgccggcgccgctggttgacccgacggagtttacgtcatggtcgttttacagagcagggatagcagagtttgtggccacttttgctgttctctacatcaccgt

SEQ ID NO: 86767 - DNA, 264 bp, Glycine max
  Clone ID: 700951875H1
atataaggcaattcttaaatgggcagtaaagttgggtatggattttgatgttataagatcaaattcaacagttctccatgtcttccccttcaattctgagaaaaagagaggtggtgttgctttgaagctggtaatcatttgataaaaacatttactgatgcatcctttcatttagagcaatctgtgaactagtacgagacatgtattcatccttgtttcaattgataactttcacttgtgaactaagttaagttgtaatagtga

SEQ ID NO: 86768 - DNA, 263 bp, Glycine max
  Clone ID: 700951876H1
ataagaagaagggtgagctaaagtcaattttccttcctttcctttccactagtcacataatcccgctagtggacatggccagactcttcgccttgcacgacgtcgacgtcaccatcatcaccaccgcacataacgccaccgttttccaaaagtccatcgatttagatgcgagtcgcggtcgccccatcagaacgcacgttgtcaacttccccgccgcacaagtgggtctccccgttgggatcgaagccttcaacgtcgatacg

SEQ ID NO: 86769 - DNA, 264 bp, Glycine max
  Clone ID: 700951877H1
gatcttttcctctgagaagacgtgtcggtagctgaagcattttgtaagcctccactttcctgaactagttttaacatacaatctttcaagtacacctccccagcttccatttaagaatggagatcactagaataggccaatggttaagtcttctgatatgtgtactactattactgcagacagaaggggttcctgtgggaatcacttttgttgaaaatgcagtggcaaaaggggctgtttgtttggatgggagtcctccagctt

SEQ ID NO: 86770 - DNA, 264 bp, Glycine max
  Clone ID: 700951878H1
gtcctttatagcagcaacatacccaaagttgacgcgccaatgtctttaaatgcaatggcatttacaaaacttagagtttcatcgtttacaagctcacttgctagtaacaattcaaggccatccatttatcaaccatggaacttatcgttgcaatcatcaaaaataggaatggtgccaaataaattatccatcaagtccgttgcttttagtgacaaggtgcctagtcaaacttatcttggtacgaaagatttggatcaagttata

SEQ ID NO: 86771 - DNA, 268 bp, Glycine max
  Clone ID: 700951880H1
attgaaaggcaagatgtgaagcaaatggtagttgctacacttgctgaatctggcatgaacctatcagatgatgttatagaaagtataattgacaaggttttaccccattttctataacttacatttctaagttctaatagtgcacatgagtcttaagagtctcattttctctttttgaaaactcacatggatagtttcaacattaaattttggatttctttagaccttcgaggaagcagatacaaagcatgatggcaagattgacaag

SEQ ID NO: 86772 - DNA, 278 bp, Glycine max
  Clone ID: 700951881H1
gaattcggatcgagctaaagcacaagaagttcctgcgaaaattccttctcagcaagtgcctagcttcacatcctcttgggcagttgatgacttgttggaattaacagactttgaatcaccagacaaagttcagaagcaatcccttgagtttggagaacttgaatggctagcagatgtaggcctttttggtgaacagtttcctcatgaagctttagcggcggctgaagttcctcagcttccaatgactagcagtgttggctcacacaaagcccccaaat

SEQ ID NO: 86773 - DNA, 254 bp, Glycine max
  Clone ID: 700951882H1
aagaaatcaaagagaaaacaaaaatgactgatcgaagtccacgagtgcttttgcgagattatatctatggtgggatgagaaccaacaaccaaaagaagaagaaaaagctacccttttgtgcatgtgtgcgacctcccaccaagggagattgattgttaccatatagtttgaagtaagtgagacattagctttcttgtttgtaaaattttgtttctaaggatgcttcaagaccctacatattttgatcatcctag

SEQ ID NO: 86774 - DNA, 266 bp, Glycine max
  Clone ID: 700951883H1
caacctcacagcaagtgggcctaggcccaacccgcaaggctcctaccattacggtctcataaacacaaccaggaccatcatactgtcgggttcaccaggtatagtgaatggcaaacaaagatacgcaattaatagcgtgtcttacgttgctccggacactcctcttaagctcgccgactacttcaaaatccctggcgttttccgtgtgggaagcattctgacaggcccatggcggtggcatataccttgacacatctgtgctgcaa

SEQ ID NO: 86775 - DNA, 151 bp, Glycine max
  Clone ID: 700951884H1
ctagttctagatcgcgagctgccgccctattttttttttttttagaaatggcgaatagagaagaaaacaaccacggtcacaaattcacagtgaaatatgttggcctcaacggaatggaatgcgaaggcaaattgccgaggagggtggtggc

SEQ ID NO: 86776 - DNA, 260 bp, Glycine max
  Clone ID: 700951885H1
atcccctgcaaggctgtcacctagaaggggatctaaggcgtctaggtggagatggagaacgacctcttccaggagacaccttagatcccctagctggctgtcacctagaaggatgcgtggaaacccaggtcgaagacgttcacctccacctcctcccaggcgccgatcaccacctagacgactacgtagtcctcctagaaggtctccaattggtcgtagacgtactcgctctccaatacgtaggtctgcgcgctcacgct

SEQ ID NO: 86777 - DNA, 160 bp, Glycine max
  Clone ID: 700951887H1
ccattgctgaataagtgcagcaatgcccaaaaatttgaactagaaactttgaatctggatgcagatgatgatcagcttcctgagacatggaatagtaaagaacgaatctaatatgtgtcaggatttgtctagtagaaatccaaaccagaacatgaatttg

SEQ ID NO: 86778 - DNA, 264 bp, Glycine max
  Clone ID: 700951888H1
tgctgacttcctgtttgtttctgatctatggcttccaaggagttctctggtctttgttccttggtttcttcactctccgagagcattttgtgcactactgggttgaaaatgtatttggtggagagcaaaggaggtgccataacatgcatgttcttggctcttttcttcttggggacatggcctgctcttttgactatgttagaaaggcgtggtcgtcttcctcagcatacctaccttgattactcaatcaccaatttcttgtct

SEQ ID NO: 86779 - DNA, 261 bp, Glycine max
  Clone ID: 700951889H1
aaatgaccaagatcttctttgtattgctgttatgtctgatcatagcagcttcttctgggtttgtgaattgctttgatgttgaaaagaaggaaaagattgaaatatttgagctcaataaaggtgacctttctttgaaggtcaccaactggggtgcttcaattttgtccctggtgattcctgataagaatggaaagttgagtgatgttgttcttggatatgattctgttaaggattacactaatgatacaacatattttggag

SEQ ID NO: 86780 - DNA, 157 bp, Glycine max
  Clone ID: 700951891H1
aaagtgagaacacaagatgggtatatatggagaaaacaattataactgcttataataaattaaattggcaatgtaatcgattatttcaagaaagtaatcgatgagatttcccatttaatcgattaaagtgttcttccccaaacctggaaagttttcg

SEQ ID NO: 86781 - DNA, 261 bp, Glycine max
  Clone ID: 700951892H1
aaaattagctcattgtgttgtgttatttattgttgtttttttctttttcgtgaggtggaaaatgatacggacggtgggtttttggtatccgttgaatgtgtatgggtggggaaagtggaggaaaagctgttagtgaactagtcttagctcttaggtatgtttggatacatttctccataaacactttaggtgaaaaaaaatagaaaataaaatgagttggacttctactataagctaatgttaaattttatataagctttc

SEQ ID NO: 86782 - DNA, 260 bp, Glycine max
  Clone ID: 700951893H1
ttccggtttctctctctctctctctctcatggcgaatctagcacacttctccaagagagccctaagaagcgcacacgcgctcgcaaggcaccacgtgcagccgcagctgctggcagcggaacgcgcttttgcgacggaggcggcgaaatcgatatccccgtcggcggatcgcgtgaagtgggactaccgagggcagaggaagataatcccgttagggcagtggctccccaaagtggccgtggatgcttacgtagcaccca

SEQ ID NO: 86783 - DNA, 258 bp, Glycine max
  Clone ID: 700951894H1
ctatgaacaatgatgagctacatgtggttatgttcccattccttgcatttggccacattagtccatttgttcagctctccaacaagttgttctctcatggtgttcatgtcactttcttgtcagctgcatccaacattcccagaatcagatcaactcttaatctcaatccagccatcaatgttatctcactaaagttcccaaatggtataaccaacactgctgaattgccacctcacttagctggaaatctcatacacg

SEQ ID NO: 86784 - DNA, 263 bp, Glycine max
  Clone ID: 700951896H1
gatttgtatgctgcagctaccatattaagatagacttgtgcatccataaatttcttcttgttaattgatcacaaattcagagggcgagccctggtgcagcggtaaagttgtgccttggtgacttgttggtcatgggttcgaatccggaaacagcctctttgcatatgcaagggtaaggctgcgtaccacatccctcccccataccttcgcatagcgaagagcctttgggcaatggggtacgaagtttttttttaattgatcac

SEQ ID NO: 86785 - DNA, 274 bp, Glycine max
  Clone ID: 700951901H1
cattatacactttcatttagtccttgtgtgtatctgttgacaaacatgggaaccacttgtccagaatcaccaccacttctccaagacctaagggttaccatccacgaaacttcaatggtttttccatccaaagaaaccgagaagaggtcattgttcctatcaaacatagacaaggtcctacaacttcgaagtggaaacggttcacttctttggagcaaacaaagattttccaccccaaaaagtggccaagatgttcaagaatgctctagaggat

SEQ ID NO: 86786 - DNA, 270 bp, Glycine max
  Clone ID: 700951902H1
agagagaggagcacaccatcgacaacatcctacacatgcagcttcacagagaccccaatgtcttgtttgtcggatacaagcttcctctcctcttcaatacaaaattattgtcagggttagcgtcttttccttattactactattgctgccttctttcaatttcatggaatagttcaggtttttgttctaagctatttcgagcatatagttagttagggttaaagaataagacccaaatcctacttttatttggaataaatgtggattgca

SEQ ID NO: 86787 - DNA, 267 bp, Glycine max
  Clone ID: 700951903H1
catttgctggtgagaggtgaccccatctctcttttatctctctcttccaaaaagcaccgatttttgcgcacgccaacgcgaatcgcgaagagggtctcaccgagaacaaaaaatgggtgtttgtgggtcgaggcccaaagtgaacgaagaagacctctcatcaaagaagaagaacaacaacaacaacaatcatcgaagaagaagaaggagaatcctcagaagacgcgtatcttctagaaagatcgaagccaacaacgtttctcactc

SEQ ID NO: 86788 - DNA, 263 bp, Glycine max
  Clone ID: 700951904H1
cgccggggccattgtttacattaagatagaccttgcgttgcaaacaactatggaagggcttgtggtggccatgtccctgattggagcaacggtaatcaccacatgctctggtcctatagcggattggctcggtcggcgacccatgatgataatctcatctgtgctctatttcttgggtggtttggtgatgctgtggtccccaaatgtgtatgtgttgtgcttggcgaggctacttgatggatttgggattggccttgctgtga

SEQ ID NO: 86789 - DNA, 260 bp, Glycine max
  Clone ID: 700951905H1
cggatgagatgtacaccacaccggaggatcttgttaaggtcgtttaccactccgcgaaccggattgcgcccgctcacgaagggatggaattgggtattggcgacacttccatcgtcaaggcgcttgctgaggcgtacggaaggaccgaggtgtggattaagactcagtatcagaaaaaaggggatttgggcttggttgctaaagagagacgtacctcgcaacctatgatgtttaagcccgaagacattgactattacgaa

SEQ ID NO: 86790 - DNA, 262 bp, Glycine max
  Clone ID: 700951906H1
cgaggatgaaaagattgaactttcacataggagaaaacgaaaacgaacaataatgaatgataagcaggtgatgctgattgagagggcactcaaagatgagcctgatatgcagcgaaatgcagcttcacttcaatcatgggctgataaattaagtgggcatggttccgaggttacatcttcacagcttaaaaattggttgaacaatcgaaaagctaggctagctcgcacagctagggatgttaaagcagcagcaggtgatgac

SEQ ID NO: 86791 - DNA, 263 bp, Glycine max
  Clone ID: 700951907H1
gtcattgaaggctctctcccaccgtctctcgacggcgcctacatccgaaacggccccaacccccagttcctcccgcgtgggccctaccacctcttcgacggcgacggcatgctccacgcgcttcgcatctcccatggcaaaaaacccacgctctgcagccgctacgttaaaacctacaaatacaccatggaaaacgacgccggtttccctctcatccccaacgtgttctccggcttcaactccctcgtggcctccgcggcacg

SEQ ID NO: 86792 - DNA, 263 bp, Glycine max
  Clone ID: 700951908H1
gtcatttctctctccggcgagaaagaaaaatgcagcatttcatggatttgcaagcgaattcggagttgggtgagtcgaattcatggctttcagtgaaagagcagtccggtgcggcacccaacaccaatttggatcgcgtcctcttcaacgacctcgtcgagattgtccctctcgttcagtcactcatcgatcgtaaagcaagccgttcattcacgcggcgtggttccatgatctacaccaagacacccaccagagaatcattg

SEQ ID NO: 86793 - DNA, 264 bp, Glycine max
  Clone ID: 700951909H1
aattaagcaccacaccactctccaatatccccaacatggctcaagtgggttctctatcttccgaaatggagacactgaatcatgtcctagccctagtggaggcattccgagcatttgacgcggacaacgatggccgaatcacgcaggcagagctaggaggaatcttggggtcactcgggtacaaccctagcgagcaagaagttagggcaatgattgaacacggcgacaagaacaaagacgggttgttgagcatccacgagttct

SEQ ID NO: 86794 - DNA, 262 bp, Glycine max
  Clone ID: 700951910H1
ccaattctctgaaatcgtatccttcaaatgctgttttgcctttacaaagctatacaaatgagtatcaggtatcttgttcaggactctccggagttgccactggtgctacctcttcagaagtttgctctggtgcaaataatttttctttgcaagattttgcagttggacgtagtagcctttctctccctcatgatggtagacaacggtcaagtaatggttactcctgtaataaaaaggtgcgtgaaaatggaagaatggtaag

SEQ ID NO: 86795 - DNA, 264 bp, Glycine max
  Clone ID: 700951911H1
acgagatttctgatgatgatgaagcctccacaaagagttccaaggataaaaagtcaaatggacctgattctggaaaagcatcaaaccttattttcaagattacaagcaaggtcccttacaagactgttatgaaagctcaaagtgcagttttgttaaaggctgagagtatggcagataaggttgagtggatcaacaagttaagaagtgttgcacaggctaaaggaggtcaagccattggtgaacctagttttcctatgcgacaaa

SEQ ID NO: 86796 - DNA, 102 bp, Glycine max
  Clone ID: 700951913H1
tcccaatacagggaggcttatcagttgggttgatagcattgatatatcctgaaatcctctactggggttttgagaatgttgacattttattagaatctcggc

SEQ ID NO: 86797 - DNA, 265 bp, Glycine max
  Clone ID: 700951914H1
ctggccttggaagtatctggttccatggatgagggaagacctatttgctaggagagaagctaggtacagtaggggactgaatatcattgaaagcaatgattcttatgacatggaagattttgcaatgccattacaagaatacatcaatgatcctgtggctgtggatgttgtacataatggagccacattccaggttgcaggtttgacaaacaattcttatatagcagaagcacatgaagtgcgccattgtgtacagaaatataag

SEQ ID NO: 86798 - DNA, 265 bp, Glycine max
  Clone ID: 700951915H1
gttgcgaagtcgtgcaactatcccagattatgcttataaggcaattgatgcattgcctgtttctgctcatccaatgactcaattcacaactggtgtcatggcccttcaggtgcagagtgagtttcagaaggcatatgagggtgggatagctaaggcaaggtattgggagccaacttatgaggatacaatgaatctaattgctcgtttgccagccattgctgcttatatttatcgacggaaatacaaggatggaaaaatcataccg

SEQ ID NO: 86799 - DNA, 267 bp, Glycine max
  Clone ID: 700951917H1
aggaaatggagttcccaagattcaacactgataaaagccagtcttggtcaagcatcttctggtgaaactcgggaacatctgtatcataattttgagactgatcctaatagtggcagccttggttcaaaaactaaggatcttgcttatgccgtcaatccaatgggtcaaaactttggctctcaaactagccaacatggacacatggacagtagcgtgacttagagggtctttcaactcctcgtctagatgtaaacggtttgatgtcat

SEQ ID NO: 86800 - DNA, 265 bp, Glycine max
  Clone ID: 700951918H1
tctcagacagtttcttcaaatcctagctccttccctgagaccagcataatcgcccgtccagggagggagcagcagcgcaagggcttgagtcctggtgccattgtggccatcgtgatcgcgaattgcgtggcactgctcgtggtagtgtcgttcgcggtggcgcattgttgtgctagagggaggggttcgagtttggtggggagtggggagagctacgggaataggaagattgagagcagctacaatgggagtgatgagaagaagg

SEQ ID NO: 86801 - DNA, 263 bp, Glycine max
  Clone ID: 700951919H1
ggctggcttagtagagtgcaagagactaattgctggcattgggaaaatgatgagtgtccaagtcattattgaaggatcaatgaacagttcaaacccctatttttcaagctcttggaggcgcaatttcactggaggtttcattcttgatatgggtgtgcatttcattgcagggttaagaatgcttgttgggtgtgagattgtttcagtttcagctatgacatctcatgtggatttgaccttacctcccccagataatatatcat

SEQ ID NO: 86802 - DNA, 263 bp, Glycine max
  Clone ID: 700951920H1
gcctgtgaagagaaatacctcaacagcaagacagaggagagcacccacacaggaaggtcgcacttgccatagctcgcgatcggcggtgcaccttgatatacctctgacagggccaaaatggctcaaagaggcatgggtggggcgacttagaaacccggccttattcaacagactcgaagaggaacttctgtgggatatcggaactaatatttcggtgaaatatatgggggacgacatggttctgctccttggactcacagatg

SEQ ID NO: 86803 - DNA, 265 bp, Glycine max
  Clone ID: 700951921H1
cgagcaaccatggcaatggcaacccaagcctctctcttaaccccacccctctccggtctcaaagccagcgaccgcgcctccgtgccatggaagcaaaactccagcctctccttctccagcccgaagcccctcaagttctccagaacaatcagagcagcagccgccgacgagaccacagaggcaccagcaaaagtagaggctgcaccggtcgggttcaccccaccagaacttgacccaaacaccccttccccgatcttcgggggca

SEQ ID NO: 86804 - DNA, 262 bp, Glycine max
  Clone ID: 700951922H1
cttgctgaggctgcagcaacaccaagataggaccccattttatccatctgtgttataaaccaccaactggacctgtcaatgtcaagttagcattagtcggaaaaggtttgacttttgatagtggtggctacaacatcaagacaggacctggctgtttgattgaacttatgaaatttgatatgggcggttctgctgcagtttttggagcagcaaaagctctaggtcagatcaacctcttggagtggaggttcattttatagtt

SEQ ID NO: 86805 - DNA, 260 bp, Glycine max
  Clone ID: 700951923H1
ctgatattatatttccaatttgctgtcaaaacattattatcgatcaatttgaaattgatacagagctgagagcatcaaggaatagaatagaagattcatttttccattttgatatggaagctgatgtttctattatttttgccgcgttttcaaaaccctaaattgaagaaatcccaatttcccctcctctctctctgctttggatgattttcaaccaaaaatctgtgcttttgtgcttttcgaatcttttgctctgatgg

SEQ ID NO: 86806 - DNA, 261 bp, Glycine max
  Clone ID: 700951925H1
ctatttcctcttcttcatcacttgaatccaccaagtccttctcctcacacacataaaaacaaatatcctccacttcttctacccccagcagtagaacaagaggtgccggagcaagtttcgtcacgccggaacgatgaccggcggcggatccacggggaggttgccgacgtggaaggagagagagaacaacaagaggagagagagaagacgaagagcgattgcagctaagatctacactggccttcgagcccaggggaacta

SEQ ID NO: 86807 - DNA, 260 bp, Glycine max
  Clone ID: 700951926H1
agacaagccaagtgaaagagagaagataagtcaaagacaatgtcagggatcattcacaagattgaggagacccttcatgtgggaggccacaagaaggaggaggagcacaagggtgagcagcaccatggtggagaatacaaaggggagcatcatggtgaacacagtactgaatacaaaggagagcatcatgttggtgagcacaagccggagcaccatggaggagaagagcacaaagaggggttcctagacaagatcaagga

SEQ ID NO: 86808 - DNA, 261 bp, Glycine max
  Clone ID: 700951927H1
ggcaatggcaacccaagcctctctcttaaccccacccctctccggtctcaaagccagcgaccgcgcctccgtgccatggaagcaaaactccagcctctccttctccagcccgaagcccctcaagttctccagaacaatcagagcagcagccgccgacgagaccacagaggcaccagcaaaagtagaggctgcaccggtcgggttcaccccaccagaacttgacccaaacaccccttccccgatcttcgggggcagcaccgg

SEQ ID NO: 86809 - DNA, 261 bp, Glycine max
  Clone ID: 700951928H1
ctctctctctctctctctaacacggagtgatggctgtgcagctgtgggaaaccctgaaggaagccatcgtagcctacactggcttctctccttccaccttcttcacggtgctggcgcttctttttgccgtttactacgtcgtcacgggtctctttggctcctccgacgatcaccatcaccgccaccgccacgtcgaggaggaggaggagatgccgcctctgcgccccccggttcagctcggcgagatcacagcggaggagc

SEQ ID NO: 86810 - DNA, 263 bp, Glycine max
  Clone ID: 700951930H1
ggaaagatgatattgcagttcttcgtgctttcacagagaggcgataacatcgtctaccgcgactatcgtggtgaagctcaaaaaggaagcgctgagacatttttccgaaaagtaaagttctggaaagaagatgctgagggagatgctccacctgtttttaatatagacggtgtgaactacttccacgtaaaggttgctggattgctatttgttgctactactagagtcaatgtctccccttctcttgttttggaacttttaca

SEQ ID NO: 86811 - DNA, 264 bp, Glycine max
  Clone ID: 700951931H1
ctctaacatcatagtcctcagaggctgattggtgcatactaattgtagacaggctagtcttcctattatcacaaacaatgtctgacagtcaagaatctgacaagaacattgagatatggaagatcaagaaattgatcaaggctctggaagctgctcgaggtaatggtaccagcatgatttctctgataatgcctccacgcgatcaaatttcccgggtcactaagatgttgggagatgaatttggaactgcttcaaacatcaaaa

SEQ ID NO: 86812 - DNA, 265 bp, Glycine max
  Clone ID: 700951933H1
aaacttcggcaaaatcatgtatgcaattgtaactaggcccgggccgaaatgatatttcattcattgatgtaaaactgtaaatattagcttcattgaatttttgcccatgcgagttacaaattaatttcaccttgagcaatttgttgtattccgtgctataaatgccactaataaaagcactccttgtaaatatccgattttgttccaattggaatggtggtggtcattgttttgaaaaaaaaaaaaaaaaaaaaaaaaggggggg

SEQ ID NO: 86813 - DNA, 265 bp, Glycine max
  Clone ID: 700951934H1
caaacttggttttaattggtataggcgtgccaaggtcttgttaattttgagcgttaagtgctgcaactaatcagatcccaagaccttggcctaccttgccatacagaaaaaaaaaaagcaaaaaaaaagccaaggtttggagccaacaaaaataaacacaaagcacaagtcatggaaagaataatggttggaagtgcaacaaaggttgctttcaccctcttggccactttcgccattgacattccatgccttgaggctggcattg

SEQ ID NO: 86814 - DNA, 262 bp, Glycine max
  Clone ID: 700951935H1
gtccacttttgaagtacagagaagaagaattgaagaatgtaagaggggatggaactggagagcgcaaggaatgggataggatctatgattatgatgtctacaatgacttgggcaacccggatagcggtgataaatatgcacgccccgttcttggtggttcagccttaccttaccctcgcagaggaagaaccggaagaggaaaaactagaaaagatcccaacagtgagaagccgagcgattttgtttaccttccaagagatga

SEQ ID NO: 86815 - DNA, 260 bp, Glycine max
  Clone ID: 700951937H1
agttgttgcagttaaaaagctcgtagttggaccttgggttgggtcgatcggtccgcctccggtgtgcaccggtcggctcgtcccttctgccggcgatgcgctcctgtccttaactggccgggtcgtgcctccggtgctgttactttgaagaaattagagtgctcaaagcaagcctacgctctgtatacattagcatgggataacaccacaggattctgatcctattgtgttggccttcgggatcggagtaatgattaaca

SEQ ID NO: 86816 - DNA, 261 bp, Glycine max
  Clone ID: 700951938H1
tgactgctactcgctcatcccgtggagataatgggagagacaaaggacgaagcatacgaggaagagcttctcgattacgaggaggaagacgaaaaggcccccgactccgccggagctaaagtcaacggcgaactaccaagaagggctatgttggaattcacagttcgggattcagggacttccttctgaagccagagcttcttcgggctattgtggactcgggatttgagcatccatctgaagtgcaacatgagtgcatac

SEQ ID NO: 86817 - DNA, 262 bp, Glycine max
  Clone ID: 700951939H1
gtgaaagacgtcagaatgtacagtcaagacaagataatagctaatcatatcataaaggtccataaatcagctggtggaaggatgggagagagcagaactttgaaagaagagaattggctgaagaggtatttacaatattgtcgaactcaatgccaccctcgtctatctgaatcagcaacaacattattgcagaatcattatgtgaaaatcagacaggatatgagacaacaagcgaatgaaactggagaagctgcagcaatac

SEQ ID NO: 86818 - DNA, 261 bp, Glycine max
  unsure (1)..(261): unsure at all n locations
  Clone ID: 700951940H1
atacaatggaaacatgaaaccgtggctggagataagtattcgccaagttccgaggttattggacaaagtatgttgactacaatcttgtgtatttacgagaatgcaacatcaatccatagaaggatctggtggcatgtgtagggcatgaaatttatttaaagcttttatgattattttttatacattttcctccctgtatggaaaaagatcccaagccaaaatcacgagtatgaaatgtgntcgttcgtttcctttggctgt

SEQ ID NO: 86819 - DNA, 260 bp, Glycine max
  Clone ID: 700951942H1
cttttgctttatgttattacagcaaactgaactgaagcaaattccatccatgtctcggcttcaaaagtcaacaggtcagcagcaaatgtttcattccctacaccaaattctgtccccatacatgtcaagtgttgttgtatctgtgttattgtggcatgtcattgctgtgcttttggtttcaaatttggcctttgcttcaagccttgaggaaacaaatggacacccaaaacacaaaggtgaggtgatctatgcccacaatg

SEQ ID NO: 86820 - DNA, 169 bp, Glycine max
  Clone ID: 700951944H1
agtttttctctcaaccggcccaatttagcataagcccagcatggccaccgcaacagcagcagccacctcgtccttcatggggacgcgcctcctggaggcccactccggggcggggcgggtgcaggcccggttcgggtttggcaagaagaaagccgccgccccgaagaaa

SEQ ID NO: 86821 - DNA, 261 bp, Glycine max
  Clone ID: 700951945H1
atgagctttgattagtgtggcctagttgttgttttctcgatgagaaaggcttcttccactatgcattgcgcacttctgcgcttttgggttcccttgttgctgcttgctagcttcagctatgctccttctgtttcggccacaactgaaatttcagggaatgaagtgaacacagatgggaaggtgataaatgaagagttagcaaaaccaagtctaaaaggacatgatgaagaagcaaagttcaaaggattttttccaaaacca

SEQ ID NO: 86822 - DNA, 262 bp, Glycine max
  Clone ID: 700951947H1
attttataaagcattttcaagtttctctaacactgaaaaggaattgctccatcgcctatttcttcaggtcattacttcgttgcatgaaaacttagaggatgggtttgagacggtctgtcttcaaacacaggcaggagctactcttgatgctgtggaggaaattgtggaagaacaagatctggatgtcttattttcagataggagtaacataatggatgttgctgagaatctgtctatggcaaagaagaatgaaatccaacac

SEQ ID NO: 86823 - DNA, 263 bp, Glycine max
  Clone ID: 700951948H1
ctctttctttctctcaaagtgttgaacttgaagttgcagagagaaaatggattgagaattctctctcttttctctttctcttcccaactttccttccttgggatcattctgcttctttgctatggaagactcagattcagttgctacgctgatagattccacaacttctaagatacagcagctgcaaaaggcatttgctgaacttgaaagttaccgagctgttactcctgaacttgaaatggaaagaactcgaggaacatttt

SEQ ID NO: 86824 - DNA, 126 bp, Glycine max
  Clone ID: 700951949H1
agcgccttcgactacaccccaacgccgtcgtcttctctgtttcatccttccgctctttatgttactcatacgctcagtctcaaacacaaacacaatctctctctccttcttctctagatcagatct

SEQ ID NO: 86825 - DNA, 261 bp, Glycine max
  Clone ID: 700951951H1
gagaacaaagcacttagtgctattcaataattacgaaaaaccaacagcgagtgttgtttttgtttggtccaggctggaccagggaatgaatagagatgagaggctttcggttgaagagaactgagttaagcggcgaagccaaacgcagaatcggcggcagaaattgccaccggaagcacgtcgaagacgggtgaaccaaacacaaaattccatccaccacttctcttttcaatccccaactcaaatctgtgaagaaaatct

SEQ ID NO: 86826 - DNA, 259 bp, Glycine max
  Clone ID: 700951952H1
tgcaaagtaaatgttatgaatgtgtgtcttctatattgatgacactgaaaaaagagctggatagtttatatgccccaacagaaaatggcgaggtgccaacagcggttactgttgaaaaatctcttttcattggacgattattgtttgcattccaaaatcattctaaacatatacccttgatacttggttctcccagattttgggttaatgggaatgcatctgcagttgggaaattaccagctctggtaaaacaatctcg

SEQ ID NO: 86827 - DNA, 86 bp, Glycine max
  Clone ID: 700951954H1
ccttatctcacccttctttgactgttctcccacaccacacccatgagactcctcctgctccttattctcctctttcacgcggcgga

SEQ ID NO: 86828 - DNA, 259 bp, Glycine max
  Clone ID: 700951955H1
gtgagattcccatcaacagttctgactcacttgttcagagttatgagattcccagcaacagttctgactcacttgttcagagttatgatgtgattctaaaacccaatgtttcaatggacacatgcaatgtgtttgaaggaagttgggtgagggatgatagctaccctttgtatgatgcttctcactgcccttttgttgaaaggggtttcaattgccttgctaatgggagagcagatagagattacacaaaatggaggtg

SEQ ID NO: 86829 - DNA, 183 bp, Glycine max
  Clone ID: 700951956H1
ggtttttttaataaagttgcattgcatcaactacgtacctggattcttcccttcccagttagacctggattgtaattaatgacgtcgttgcatcatgacgttaccatatgtgtagcttggttgttatgattgtacgaatatgtgcagcagaatgcatattacaattcacaatacgattgaatc

SEQ ID NO: 86830 - DNA, 257 bp, Glycine max
  Clone ID: 700951958H1
gtccaaggcttggtttatttacttatttattggaattggtgcggtcctctttgtcatttcttgtttcggttgtattgcagctctgacacggaatggatgctgcctgagcttttattcagttttagtgttgttgttgatcttagtggagctgggatgtgcagcctttatattttttgacaaaagctggaaagaagaaattcctaaggacaaaactggagattttgatatgatatatgaatttctgagagagaactgga

SEQ ID NO: 86831 - DNA, 258 bp, Glycine max
  Clone ID: 700951959H1
ccgacatcccttctcttccaaatcctgtgatcccattccaatccgttccgttcagctcaatctcaaaatctcaatggccgataatgagcaaccgaataacgaggaggcaagtcctcttctccaccagccccatccccaacccaaatccgaaccaccaacgccacctgagactcccgagtttctcctcggctggaccgctgatgggctccctctggcccacgccagcgtcgtgggccagcccatgggccgcgccccttg

SEQ ID NO: 86832 - DNA, 259 bp, Glycine max
  Clone ID: 700951960H1
tggtaaaatgttgttttataagttgtgtacaatgcattttctgtgcaatgattttgatttttaaattgctttattgatttattatgtataaatacataatcattcaattatatagaatatatttttgcctttgcattatttttaattatgtataaatatattatttctaaattatttgacttggtttttacatgttacatataaacctgtgtaggtgaaatccataccattcagtggaactggcaagcacaaatacagt

SEQ ID NO: 86833 - DNA, 260 bp, Glycine max
  Clone ID: 700951961H1
cttctacattagttcttgttattcattattcattctcagcttcttttcttctggggggcaaaaggggtcacttttcagatccgagattgagctcctttacccatcatcatcatggagctcctcgggtacctgaatcagggtcacccttctagaggaacaacacttgttattactctttcattggtgctttcgacacttgtgtccttctccactttcacacatgccttctcttcttctgcgtttccggaactgaatcctat

SEQ ID NO: 86834 - DNA, 261 bp, Glycine max
  Clone ID: 700951962H1
cgagaatgggtttatcactcttacggtgggttctgccgctgactctgttgctcacctgcgccctaggtttccaatcggacgagcttctcctcgacgacgaagagttcggcatcgaaggaggacgaacctcctttgattccgattcgcatccaccttccaccgcctccacctcgaggaagaggctttccgactcctcctccgattccaagatccagttccctctccaacacgctttcggcgactccgatttctccgacgccg

SEQ ID NO: 86835 - DNA, 257 bp, Glycine max
  Clone ID: 700951963H1
gtaagctcccaagcagtgggaggaggctcgggactctgaccgcgtgcctgttgaagaatgagccggcgactcataggcagtggcttggttaagggaaaccaccggagccgtagcgaaagcgagtcttcacagggcaattgtcactgcttatggacccgaacctgggtgatctatccatgaccaggatgaagcttgggtgaaactaagtggaggtccgaaccgactgatgttgaagaatcagcggatgagttgtggtt

SEQ ID NO: 86836 - DNA, 263 bp, Glycine max
  Clone ID: 700951964H1
aggtgatctagcaaacagcatgacagagaattcccagggaacaaccctttcaagaggagggatgattgctgggttagagccaatcaattttataactttagcaacaccacatcttggcgtgagaggaaagaagcagcttccatttctgttgggtgtcccaatcctagaaaagcttgctgcacctatagctcccttttttgttggtcagacaggtagtcagttattccttactgatggtaaacctgacaaacctcctctcctat

SEQ ID NO: 86837 - DNA, 263 bp, Glycine max
  Clone ID: 700951965H1
atgcaccccatatcagaaatacaaaggagagattccggtcaatgcctatatgttgtcccatacttcttcctttaccacatgccttggcattgcgcatgattttacaattgggtgttaaaccttcttggtttaacacttgcagtacaaccatagaaaagagacctcacttaattccaggaactccttcatctaaaggggatcttcgcacctacatgatcgacataccacctcttggcgactcagtggtgcctgagatgctctta

SEQ ID NO: 86838 - DNA, 261 bp, Glycine max
  Clone ID: 700951966H1
agcagtgggaggaggctcgggactctgaccgcgtgcctgttgaagaatgagccggcgactcataggcagtggcttggttaagggaaaccaccggagccgtagcgaaagcgagtcttcacagggcaattgtcactgcttatggacccgaacctgggtgatctatccatgaccaggatgaagcttgggtgaaactaagtggaggtccgaaccgactgatgttgaagaatcagcggatgagttgtggttaggggtgaaatgcca

SEQ ID NO: 86839 - DNA, 258 bp, Glycine max
  Clone ID: 700951969H1
ttcccctctcatcattttaatcacgcgcacatcagcacaacacaacaattcactaagctaaaatcacttcatcatggcttcctcgtgtgcttcctctgccattgcagctgttgccatctccacaccaagttcccagaagaatggatcactcttgggaagcacaaaagcttcttttcttagtgggaggaaactgaaggtgaacaactttacagcaccagttggagcacgatccagcactacagtttgcgcagttgctga

SEQ ID NO: 86840 - DNA, 256 bp, Glycine max
  Clone ID: 700951973H1
cgtgattccttggcggagtgcgagcgtgcaccgagccgcggcgagacaaaacgctgcgttgggtcgctcgaggacatgatcgactttgccacctctgttttgggccgaaacgtcgccgttcggactacccagaacgtgaacgggtccaagaagagtgtggtggtggggcccgttaggggaatcaacggtggtaaagtcacccaatccgtgtcgtgccaccagagcctgttcccttatctgctttactactgccacg

SEQ ID NO: 86841 - DNA, 258 bp, Glycine max
  Clone ID: 700951974H1
ttgaggtcttgtatgtggctgcagatatccaaaccttaaattcggtcctcgaatctttctgatcattggttgttttttattctttcaaatacattccaaaatctcttggaaattgcgagattcactgcttatcctagcagcagattttgggttctgacccaattattcattttccccaactgggtcttgtggattttttgttggggttttaaatttcgtgttgctgggttttgaaagttatttcctttcttccccgtc

SEQ ID NO: 86842 - DNA, 257 bp, Glycine max
  Clone ID: 700951975H1
atgataccatggatgccaatggggaagctagattgattaatggttatggctcaaaacaagtttcacaattccttaatgcaaatatgaagaagcccaaggtggtttctggtgatgatgatttaccaaagagagatgatattggtgaaaggcgaaggaaacacgagcttcgggtgttggctggtgctggaattaggactgaggatgatgatggtgatgatcagatgactgatcttggacctaatgaggttaccgatgaa

SEQ ID NO: 86843 - DNA, 87 bp, Glycine max
  Clone ID: 700951977H1
ctgaaaccccaacacccaaaggaatatgtgattgggtcatggctgaaagtgatataacagccatgaaggagacgctccgtgcgcaac

SEQ ID NO: 86844 - DNA, 258 bp, Glycine max
  Clone ID: 700951978H1
atttccctacctctcccttcaagatgcagatcttcgtcaagaccctcaccggcaagaccatcacccttgaggtggaaagctctgacaccatcgacaacgtcaaggccaagatccaggacaaggaaggaatccccccggaccagcaacgtctcattttcgccggaaagcaacttgaggacggccgtacccttgctgactacaacattcagaaggagtgtactcttcacctcgtcctccgtctccgtggtggcatgcaga

SEQ ID NO: 86845 - DNA, 261 bp, Glycine max
  Clone ID: 700951979H1
agagaaagcaagttagatcaaagatctgaatcgagatcggagaagaggaagaagaagaagaagagtatgggaacgacggtggcgggtctagcgccgggtctgtcacggaagctgaagaaggttctagaatctcggatcgatacgccagacctcttgtcttcgctcaacacgctctcttccttctacgatgacaacactcctcaggcgcgtcgcaacctccgatccaccatcgagaagcgcgccctctccatcaaccgcgaa

SEQ ID NO: 86846 - DNA, 262 bp, Glycine max
  Clone ID: 700951980H1
aagagctccaaggaatcaactcaatgactccaacccatctatttcaagatattgctaaagagggttataagtttctccaagtgattatatatatatatcaccaaagacaaggctctaaataggtggatttccagagtaaaaaagtattggcatgttcaatactaactctactgtcgtgtgttctttaccactgtattgaaataattttagatgcaatgtgatgtggttcgatagttgttttttgttacctttcagtttagaa

SEQ ID NO: 86847 - DNA, 260 bp, Glycine max
  Clone ID: 700951981H1
aatggcggctctcagaaaagccgtgttctttgtaatcgctcaatgcttcaccttttccgcatatgctgcaaggtttgaaatcacaaaccgatgcacatacactgtctgggctgcgtctgtgcctgttggcggtggcgtgcaattaaacccgggccagtcatggtccgtggacgtgcctgcaggaacgaaaggggcccgcgtttggacccgaaccggctgcaacttcgacggttcgggccgcggtggatgccagaccggtg

SEQ ID NO: 86848 - DNA, 257 bp, Glycine max
  Clone ID: 700951982H1
atgcagctgccaaaaaggcatcagaggatgcttccaaacaggagaaagatggtgagcagcaagctagcccacaggatacaacaatgactgagggtgccagtgcagcagcttctgaagccgagactaagagaactgatttgacggacgatgagaatgctcttctacagcaggcccttgcaatgtcaatggatgatcccacaattaaccatgaagtgagagatacagatatgtctgaagcagctgctgaagatcccgag

SEQ ID NO: 86849 - DNA, 255 bp, Glycine max
  Clone ID: 700951983H1
gtgccagttggaggcttggcgtggaagcaaacaacgtagtcaagtggcaaactgttcctgcagcttgcggagagtacatagctgactacgttctaggagaccaatatagatcagattccaaaacagttaaccaacaagcttatttctatgctaaatccctcaaactcaccaacaaagatgtctttgtcttggacgttgacgacactactctctctaatctccagtattttgctaaccatggatttggtgtggaac

SEQ ID NO: 86850 - DNA, 254 bp, Glycine max
  Clone ID: 700951984H1
gcagcaggctgccacctttttgaattgtcagttgttggttcttcctttcaattacctgggaatacctattggggcaaaccctaggagaggcgactacttagtaggaaccagggtagagaagatgacaatattgagacaataaggaagcgatttaaggtctttcttggagtctagtcttcccgtgattaattattatgatgcaaagggaaaagttcgcaagattgatgctgcaaggcctatcgacgaggtatttg

SEQ ID NO: 86851 - DNA, 258 bp, Glycine max
  Clone ID: 700951988H1
aaaccttacctagtattttcgtttctgaacccaattaattaagcacacaaggaccataacatacctatacctcaatatcacaagtcttatggaggcagagcgagacaagtacaagatgatcaactttgaagaaaccgagttacgactcggcctcccactcagtggaaacgagacgctcaacaccacttgcagcactgggaagagggttttttcggatactgccgtggatttgaagcttaacctttcctcaacctcaaa

SEQ ID NO: 86852 - DNA, 174 bp, Glycine max
  Clone ID: 700951990H1
gatgccatttcagaggagcatgaacatcattttggaaggccaagatcaagggaggaggctttgcatttcttgaatgagcttggctggctgttccaaagagaaagattctcatatgtgcatgaggatccatattattcgcttgacaggttcaaatttgtactcacatttgctgtg

SEQ ID NO: 86853 - DNA, 260 bp, Glycine max
  Clone ID: 700951994H1
cgaggacgagaggaagtcgccggacatagaaattccccttgacgcgccgacgatgacgcacgacttcgcgatcacggagaatttcgtggtgatcccggaccagcaggtggtgttcaagctcggcgaaatgatcaaaggaggatcgccggtgatctacgacggcgagaagaaatcgcggttcggaatactgccaaagtacgcttccgacgcgtcgagcatcgtgtgggtggactcgccagacacgttcttcttccacttct

SEQ ID NO: 86854 - DNA, 258 bp, Glycine max
  Clone ID: 700951995H1
caaaacaaaacaaaacgcgatcatttctccgccgtagcagtggaacaaactccaccgactccgttatggacaactccggaaatcctcaagatgtggttgtgccacctgttgaaggtgttgcaggaggtggtacggcttatgggtggaatgatggtggcacacatggcttgaatgtcaagggaccaattgaccccacagaaattccaactaaggatttagtgcatgtatggtgcatgccaaacacagcaaatgttggac

SEQ ID NO: 86855 - DNA, 254 bp, Glycine max
  Clone ID: 700951996H1
ggcgattggatctgcaccggttagttttgcccccccaaccaccacttcttcttccaactaatcattcaatcaaaatcttttctttttcatttttttatttatgaattgggctttgggtcctgttttgtgtaatgggtagcgtggtttttcaagttccaaagaggaccttgtttaggaacctgttttatatatttatttagtgttaagttggtatggatgacacatgtaggaattaaatggaattaggaaattgt

SEQ ID NO: 86856 - DNA, 264 bp, Glycine max
  Clone ID: 700952001H1
agtggtttcagtgagtgatcggtgttcacttgatccttcataagtcgtcatcatcatcatcatcatcaccgttgattgaagaagatgccgatcagaaacatcgccatcggaaggcctgaagaggctactacaccccgacacgttgaaggcggggttggctgagttcatctccaccttgatcttcgtgttcgccggttcaggttccggcatcgcctacaacaagctcaccgacaacggcgccgccactcccgccggctcatctcc

SEQ ID NO: 86857 - DNA, 256 bp, Glycine max
  Clone ID: 700952004H1
gctaaaaaatatgctgcaattcttatttttattttcattttcattttttgtttttttaagaaaaaaggctaaccttctgactttccaaagaactgagtctagtaatacaccaatggatggaattttcgcttacaccattctcattttgcttaccatattttcatttatgttcttaccaaaaccaaacagaagaagacctcagaaccagacacttgcaaagctccctccaggctcaatggggtggccgtaataggag

SEQ ID NO: 86858 - DNA, 255 bp, Glycine max
  Clone ID: 700952006H1
ttgagtcattccttgattcataccagtcaatgaagcccgcaaggatagtataaggataagatggccatcatggtatctaatccttcttcaagcgatcaaggaaggtgttaatttgaagggctattatgcatggtcattttcggacagttttgaatgggatgctggttacacagttcgattcgggctcatatatgtggattacaagaacaacttgaaaagataccccaagttctctgctttttggttgaaaagttc

SEQ ID NO: 86859 - DNA, 254 bp, Glycine max
  Clone ID: 700952007H1
cactacctctgcatttttctctcgctctctgccttccatcaccctcgccatttcccttcccaagatagtagaagatggcagacgctgaggatattcaacctcttgtttgtgacaatggaacaggaatggttaaggctggttttgctggagatgatgccccacgtgctgtgtttcccagcattgtaggtcgtcctcgtcacactggtgtgatggttggcatgggccaaaaagatgcatatgttggtgagaggcac

SEQ ID NO: 86860 - DNA, 258 bp, Glycine max
  Clone ID: 700952009H1
cgttcgagtacttcaccttctttctctctaagcgcaaaacctcgtactgtttttggcggttaaggatgtcggggaaaggagcgaaggggttgatcacaggcaaaacctccgccgccaacaaagacaaggacaagaagaaacccatctcgcgttcttctcgtgccggccttcagttcccagttggtcgtatccaccggcttttgaagtcaaggacaaccgctaatggtagagttggggccacagctgctgctactctgc

SEQ ID NO: 86861 - DNA, 251 bp, Glycine max
  Clone ID: 700952011H1
ataacatctcaatgggttttcttctattacaacatcgcccgcaaccatgaccatggctgcgatcgtgctcctgttcacggtctttgccgtttcctccgccctagacatgtcgataatctcgtacgacagcgcccacgcggacaaggccgccacgatgcgcaccgaggaggagctgatgtccatgtacgagcagtggctcgtgaagcacgggaaggtgtacaacgcgctcggcgagaaggagaaggcttcca

SEQ ID NO: 86862 - DNA, 254 bp, Glycine max
  Clone ID: 700952012H1
cattttagaagaatacccctcttttgctgcatcagaggagttgtaaattaagagcatggctgcacaagctcttgtatcatcatcttctcttaccttctcagcggaggctgcaagacaaagtcttggaccaagatcactccaatctccatttggcttctccagaaaagcctcctttcttgttaaggcagctgctaccccccctgtcaagcaaggatcagacagacctttgtggtttgcatcaaagcaagtctttc

SEQ ID NO: 86863 - DNA, 254 bp, Glycine max
  Clone ID: 700952013H1
accgaatctaagagagccgatgccaaacttgctgtgaataagaagggcgccgccaccaagactaggaaacccgccggaaaggggaaggcagcgaaagatcctaacaagccaaagaggcctccaagtgctttcttcgttttcatggaggaattcaggaaggtgttcaacaaggaacatcccgacaacaaagcagtgtctgctgtgggcaaagctgctggagcaaaatggaagacgatgtctgatgcgaaaaagca

SEQ ID NO: 86864 - DNA, 254 bp, Glycine max
  Clone ID: 700952014H1
tgctgttcaaatacagtggtgcctcagctgctctcactgtagacccttcactccacttgtcaagagcttctagcattgtgatgttgattgcatatgtagtctacattgtctttcaactgtggacacacaggcagttatttgaagccgaagatgagggtgaggatggtgaggacggtgaagaagaacaagctgtgattggattatggagtggcattgcttggttggtagggatgactgtgttcattgctgtgttg

SEQ ID NO: 86865 - DNA, 251 bp, Glycine max
  Clone ID: 700952015H1
ctcgagccgaatcggctcgcgaactacatcgcgttcctcgccgattggccgcaaacagtgttgccggagtcttacagaccgtagtcccgattagctgaacggatggcgtggttgatattagagctcctctacaaggaggtccgcaactcaaacctagggttcatcctcggggagaattggttgacgaagcatgaattgaaggtgaaagagtatgcttccaagtacgagcgcgtgggaaggaaacgttttta

SEQ ID NO: 86866 - DNA, 255 bp, Glycine max
  Clone ID: 700952016H1
cccaaaacactattttattacttcttcgtctgttctttgcattgaagaaaatttctttgaattgaagaaaacttgaaatcgacttgtgcaacagaaaatacaccaaaggaaatttctactgattgaattgcagagattggaaaaatggcgttgagtatgactcaacagcatcgggaccctagctggtgcgacggtgccggattcctcggccggagaatcgaacgcggcggtgagtgccgccgcggtgtggcagtc

SEQ ID NO: 86867 - DNA, 267 bp, Glycine max
  Clone ID: 700952017H1
ggctcgagaaaacccttagccaacacaacatcatggccacctctgctattcagcaatcagcattcactggtcaaactgctctgaagcagctcaatgagttcgtccgcaagaccggtggcgccggcaaaggtcgcactaacatgcgccgcaccgtcaagagtgctcctcagagcatttggtatggccctgaccgtcccaagtacttgggtccattctcggagcagattccatcatacctgaccggagaattccctggtgatacggatg

SEQ ID NO: 86868 - DNA, 256 bp, Glycine max
  Clone ID: 700952018H1
cgatatctgatattgtgagctcgcatggagttgcgacaatgggggcactgatcttcccccaccctgacatccgccgcccacctcccccttgctgaacttggttctgtacctcttctcggcggggttctcgctcctcatcatctaaaagttgaggcttttatggtgttggtgttcgtcggagggtgcagcagaataggcataagggctagaagcatgtgcggcgccgaagcgtggtagggtggcacgtcgagagtgg

SEQ ID NO: 86869 - DNA, 254 bp, Glycine max
  Clone ID: 700952019H1
gtcttctttctttttttcatttccaaatcacgaaactcaagaagatggagaaagcgatcaacagacagaagattttgcttcatcatctcaacccttcatcatccacccaccccaacgaatcatcctccctccatgcttcagcatgtgtggcgggggatagcgctgcttatcaaaggacatcgacattcggggacgatgttgtgatcgtggctgcttatcggactgctcattgcaaagctaaacgaggggtttca

SEQ ID NO: 86870 - DNA, 256 bp, Glycine max
  Clone ID: 700952020H1
gcttcctggataacgttttcgggttcgagaaggcacttgtgttgtttttcgtacgaaatggagactaaacagagttcggtgacggttacgctcagttacggcgcgttgacgtgcgccgcggaatttctcgcgactttgctagcttctgctgtcgtcaaagcctcgcttttggccccggatctctaccggctgctattgatcaacacgcctactgccaaaggagagagcaaaattcagagtgaagacagcaacgtga

SEQ ID NO: 86871 - DNA, 255 bp, Glycine max
  Clone ID: 700952021H1
ccttcgttcactcttctttcttgcggctagggttttagcgcacttcttctagatttaaggaagatgggtaaggaaaaggttcacatcagtattgtggttattggccatgttgactctgggaagtccactaccactggccacctgatctacaagcttggaggcattgacaagcgtgttattgagagatttgagaaggaagctgctgagatgaacaagaggtctttcaagtatgcctgggtgcttgatagcttaagg

SEQ ID NO: 86872 - DNA, 254 bp, Glycine max
  Clone ID: 700952022H1
ccagaatcaaaataagaaaacagagtaattttgcatcgtcgtcacacatggagatctccggcaccgttctccgtcaggtcagctacgtctccggctatgggacccacacgcggtcccgcggcctggctcctcgttttggggtgaggatggggatgggttctggtttctgtgacgaggggcatttgcggtattaccaggacaccaaaaaggttctcaccccaaagaagaagttgaagctgctcaaggtttctcca

SEQ ID NO: 86873 - DNA, 253 bp, Glycine max
  Clone ID: 700952027H1
aatttttaatctctccatattcccacgccacttattgtagttggcatattctgaagactctgcaaaatatataaaattacgttttaatctcgaattttacttttccaatgttttctcccttttttgttttgtagttatttatccgagttgttattggaaggcttactccaaattagctgatttgattattaaagttgtaattcactgggggtgaaatctttgtaagaggttgaagaacctggttccgggtatt

SEQ ID NO: 86874 - DNA, 252 bp, Glycine max
  Clone ID: 700952028H1
atgtttttcaccaatttgtctaaggaagaagttgaaaggctgtttaaagaatttgaggaatatgactttgcaagaacaggaagcattgccactgaaaaggtggatctcaaagagggtcctttagagcaattcactcatgagatggaaccctttctcaggaagcaaggcatgcctgttcggttaaataaaggagttgtggagcttgtttcggattttgttgtttgcgacgaaggaaagcctttgtcacagagg

SEQ ID NO: 86875 - DNA, 252 bp, Glycine max
  Clone ID: 700952029H1
tttattctttatgttatgaattaatttcttgatcttgtcctcaccagtgacaaccaatgaacatacgtgatgaactgagaatgggaacaaaccatattgtttgcttaaattagcttaattgattgagcggtgtgcaagagttgttcttaatctcctaatacctgaattcaatttctatggataaaaagaaaattaatgttgccgagtgttgagagtaaagtagaatagttaataaattggatgcataacaga

SEQ ID NO: 86876 - DNA, 253 bp, Glycine max
  Clone ID: 700952030H1
gttcaactgagggtgagagtgacacaaatctagggagcactactctaaaagttctattagattcttcaaaacatgaccatgcatcgcgagtcttgggcttttgtcttcggcgttatgggcaacatcatctcctttggagtgttccttgctccattgccaaccttttaccaaatctacaagaagaaatccactgaagggttccagtcacttccttatgttgttgcactgttcagtgcaatgctttgatttacta

SEQ ID NO: 86877 - DNA, 253 bp, Glycine max
  Clone ID: 700952031H1
aaaggacattcacaactcacttcacaaactgcgatcaagtgaagcagccatttccactcccttccatatcacattcactttttgacaagctagatgagttaattaaggctttgcctgggaacaataatggaagggatgaagcttaaaaggtggctcgtgagtgttttgttcctcattgttgccacagtgagcaatgcagcaggtgcatttgtgggggtaaacattggcactgatgttactgatcttcatctgc

SEQ ID NO: 86878 - DNA, 256 bp, Glycine max
  Clone ID: 700952032H1
ctttctccttttcctcgtgttcacaaaatcacgctgcttaattattccttcaactaccatcatatcataccttctcaacagaaaaataaaaataaaaatgagatacatccttggagaacacaacattctgttcctcaaaagcttcgccttcacgatattattccttagttgcatagccattcggcttaacttgtgtctttccagcatcccttcttcactgaaatcaattccccttgaagggcatttaaaattgatc

SEQ ID NO: 86879 - DNA, 259 bp, Glycine max
  Clone ID: 700952033H1
agaaaacgaacaataatgaatgataaacaggtgatgctgattgagagggcactcaaagatgagcctgatatgcagcgaaatgcagcttcacttcaatcatgggctgataaattaagtgggcatggttccgaggttacatcttcacagcttaaaaattggttgaacaatcgaaaagctaggctagctcgcacagctagggatgttaaagcagcagcaggtgatgacaatcctgtcccagagaagcagagagggcagtacc

SEQ ID NO: 86880 - DNA, 257 bp, Glycine max
  Clone ID: 700952034H1
atcattctgaaaccaattccaccttcttcttttcgcgtcacaccatgaaacctcttctcggcttcgcaatcgcgttcctcctcctcctacattcctctcttgcttccgacatcccctaccccaaagcaatttccgatttgaaggatacaattgtgaagggatttgggtttacggcggaagatgatgttaagattacggggttcgatccgagagacgccgaggtagggcattccgtggagtaccaattcacctccaaa

SEQ ID NO: 86881 - DNA, 255 bp, Glycine max
  Clone ID: 700952035H1
gagaaatccttggtgacggggaaacactgggggagaatttattctctttgttctgtttcagcttgaatcttttctctatttctatcttgggttcctattgctaacactgactggtcttggaatcagagaaatacataacataaaattagaccaaagggcttgtgtggtcttgaacttgcaacaaatagttgatattgattttataagacactggacttccaaaggaaattgctaagcagatagttaccttattat

SEQ ID NO: 86882 - DNA, 251 bp, Glycine max
  Clone ID: 700952036H1
gtttcaggcattgctggctgggggtgatgatgatgaccactattttagtaactcttgttatgcttcttatatggcagatacacatcattgtagtgctgagttttgctgtagtcttcctgggattggagttgactttcttttcatcagttctgtggagtgtaacgcatggaagttggattatattggtctttgctgtaataatgttttttataatgtttgtatggaattatgggagcaagctcagtatgaaa

SEQ ID NO: 86883 - DNA, 255 bp, Glycine max
  Clone ID: 700952038H1
cttcttcttcccacgctcctccttctcatacccttcgccaccctcgtctccgcccgccctcacctcgccggagactttctccgactgccctccgaaaccgataacgatgacaacgtccagggcacccgctgggccgtcctcctcgccggttccaatggctactggaattacagacatcaggtccatctcatacacatgacacttcaatttttatatctttgatttcttaaataagttctggggttcaatcttgta

SEQ ID NO: 86884 - DNA, 252 bp, Glycine max
  Clone ID: 700952039H1
ggggaacagacacagtttgcgagtgaacacaagttacaacaatggctttctttggtagaattgggaatttgttacgacagacagcgagcaggcaggttagttcaaaattgcgttcgcccccttcattttttcaggctatacgctgtatgtcatctgccccaagcacaaaactgtttattggaggtgtttcatattctactgacgagcaaagcttgagggaagctttttcaaaatatggtgaagtgttgatgc

SEQ ID NO: 86885 - DNA, 253 bp, Glycine max
  Clone ID: 700952040H1
ggcaaacactcctgttcttctacatgaccacaatgagtttctgcacaaagatgaatacttgaaagggattaaaatctacgagtcaataattaaggtatatgcatcgttggatgataatggaagagatggagcatccaaagatgagttatgagcaagtggtgtggcacctacccctacctaattctcattttctgccttttcttatgtaacaatagagaggaaaaataacacctcaactgactttttgtagctt

SEQ ID NO: 86886 - DNA, 255 bp, Glycine max
  Clone ID: 700952041H1
ccagatccagcactttatctcaatctagtggcagagaaagtgagagttcagacggtaatgttttgagtaatcatgaagcagttacatatgccaatacatggactttcctagtgcctgacctcgtatgcgacgtggccaataaattattgtggaagttcaatttagacttagaggcaatttctgctagtagctctgaggtcccatcaatattagagttcctgcagcggcggaagttggaagctaacaggctaaaca

SEQ ID NO: 86887 - DNA, 250 bp, Glycine max
  Clone ID: 700952043H1
ctttggcctaggaggccaccattgggttttggtgggctttcactgaaccaataaaaaacccatctttaaaaggtgctttgttttgaaggttccaatttgcttcctgtgtttctttccaacaaggaagggagggtggtgtgtcattaatttgtgtcaagtattttggttttgctttcccccttgttagccattggtgttgcacaattggcattaaggttctattatcacatatgccaaacttacctttgaa

SEQ ID NO: 86888 - DNA, 249 bp, Glycine max
  Clone ID: 700952044H1
gattgaagaagtgcatttcgtcctctaacactcttccaaatcatggctagctcactgcttgtgagggttgccagctgcatggttgtggtgtggatgtttagttttgggcacataattcccttggcagaagctgaaattccatgtggcagggtgcaaatcactgtggctccatgcatagggtacctaaggggtcctggtggaggtgtccctgcaccatgctgcaatggggttaagagcataacaaccaag

SEQ ID NO: 86889 - DNA, 249 bp, Glycine max
  Clone ID: 700952045H1
attgtcttgagctggaagcttcggtttctctctctctctctttctctttctcttagggttttcactttcaccaatttctccttctcttccgatctacgcccaaaggtatcacctcgcgtgcattcgttcctaatcctttcaaactctccgttctcccatctttaacttgtttaagctgctacgtttaattgaattcgccgtttccaaattgtcttttcatttctttcttttgttctgcaattgacattg

SEQ ID NO: 86890 - DNA, 251 bp, Glycine max
  Clone ID: 700952046H1
cttcgaacttgaaatcgacgcgataatggagcagatgaagcagcacctcgccaccgactcaggcaaacaagtcaccaaaaaaattggactcgtttatcagattcaaattgctcctaagaaacttggaatcgacgaggtcgtctacaccgttgatctcaggaaaggagaggtcaccaaagggccatatgaaggaggaaagcctgatgcatctttttcatttaaggacgaggactttgttaaggtgccttggg

SEQ ID NO: 86891 - DNA, 252 bp, Glycine max
  Clone ID: 700952047H1
cattactatcttgcctctcttcttctgctactgctgctcaacccacacaccaccctgggagcgcagaacctcatgctaccctaccataacggcgccctcctcaaaggaaccattaccgttaacctcttatggtacggcagcttcaccccaatccaacgctccataatcctcgacttcattaactcgttaagttccaccgcgggggccccacttccctccgtagcatcgtggtggaagaccacggaaagtaca

SEQ ID NO: 86892 - DNA, 252 bp, Glycine max
  Clone ID: 700952048H1
gtctgaacccattcctgaagctaacgatgaacctgttaaagtggtagttgggaacagtcttgaggacattgttttcaaatctgggaagaatgttctgctggagttttatgctccctggtgtggtcattgcaaacagttggctccaatattggacgaattgctatctcatatcaaagtgatgctgatgttgttattgcaaaactggatgcaactgccaacgatatcccaagtgaaacctttgatgtccaggtt

SEQ ID NO: 86893 - DNA, 256 bp, Glycine max
  Clone ID: 700952049H1
gtgaaaactgaccaagttttgagcaagaagagaaaaaagcttccctagactctgggattcgcaatacagaattagaacccgatgatattttaaatgctattgttgattataagtctaaaaggggatctagataagcttctaaccaggtcaaagccacagatgcttcatctactcgactcaattatcaactccttgtgccaggttccaccgttcgtgttctatctggaacattttcagggtttacaggaccctcaag

SEQ ID NO: 86894 - DNA, 252 bp, Glycine max
  Clone ID: 700952050H1
gttcagatcccagatagacacctctctctctctctctctctgcattattatggactctccgtttcttcttccgcttcttctcatcttcctcttcctctctcccactccctcctcctcctccattgataatttccaccaagcctttcccatcgttgaacctgatcctggtcacacaaaacttcgtctttcaagagaaggtttggaggctattgagaaaataaccaaccccattgcagcagtggcaggattggg

SEQ ID NO: 86895 - DNA, 249 bp, Glycine max
  Clone ID: 700952051H1
ctcgagccgctcgagcgcgctgcgagagactcagattggacgtttcctgaggaacattgtttccaccgtgtcgcagctatgggcggcttcggagtgcggggtaagattctggaacttcaaggatctgtacgcgtcgtggtgcggcgaagaagaagaagaaggagtggttgcgaggaacggcgacgaggagagtgcgccgtttcgagagtcggtgtggacctcaccaacgttgtgtttggttgggatgag

SEQ ID NO: 86896 - DNA, 252 bp, Glycine max
  Clone ID: 700952052H1
gtcatggcatctcaactgctgaggcaaagaaggacaagagggaaactgggttggccattcctaaggatttggattctgcattggctattcctggagttggaagaagcagagatcaacatccacatgtgtatagggtttctcctgaacagaggaaggctcttggctctggttcaaccaaagctttgaaggaccatatgaagtcctctgcaactgatggtaaaatgcaacagtggttccgtgaagtcttgcagg

SEQ ID NO: 86897 - DNA, 253 bp, Glycine max
  Clone ID: 700952053H1
gttagacttcgtcacctcactcaccactcaccactcaccactcgccaatacacttcctcagaggtcaattatcgcgcgactcggtaaaatatttcttgcacactctcaatttgctgccattattttcgcatatgaattgctactttcaccctttgtttcgtgttagttagggttgtggattttgagagtggctttgatttaattctagcactagttgcagagagctgcatggtgaatacaaaacgatggttca

SEQ ID NO: 86898 - DNA, 252 bp, Glycine max
  Clone ID: 700952054H1
ctaggagacagatcactctggttggttgccacattttggggtaccaagacaccttgtacgtccagaccaacaggcaattctaccgcaactgcgtgatctctggcacagtggacttcatctttggcacctcccccaccgtgatccagcactcagtgatcatcgtgaggaagcccttggacaaccagttcaacacgatcaccgccgacggaacatccatgaagaacatggatacaggaatcgtgaccagggttg

SEQ ID NO: 86899 - DNA, 250 bp, Glycine max
  Clone ID: 700952056H1
cttcggcacctcctcaccgtgatccagcactccgttatcatcgtgaggaagcccctggacaaccagttcaacacagtcaccgccgacggaacatcccagaagaacatggctacaggaatcgtgatccagggttgcaacatcgtcccagaagccgaacttttccctacaaggttccaagtgaagtcataccttggaaggccatggaagcaattctcaaggacggttgtgatggaatccaccgtggtgactt

SEQ ID NO: 86900 - DNA, 250 bp, Glycine max
  Clone ID: 700952057H1
ctaggccttggcctgagcaactccttcaggctttcttcgtggcagcaaagtgcatatggttgctacatttattggcattttctttcaaccctccattgggaattttaagggtggaagagaatagaagctttgatcctcactacatggaagatttggttactgatagacagaggtcacaaggtccaagccgggttaagatcgtggtggtgccagggttctatgttcaggatatgatcttgaggttagagtt

SEQ ID NO: 86901 - DNA, 246 bp, Glycine max
  Clone ID: 700952059H1
ggagctgcccaaggaatgatggacaaactaggagatgatggtcttgttgtggatggcagaaaacttttctttgaatatagtagtaagccaacaggaggtcctggtccagatggagctatgaaatcaggtcataattataagagcatgatggttccatccgattggatgtgcactatatgtggctacataaattttgcacgccggacttcctgctatcagtgtaatgagccacgaactgatatgccc

SEQ ID NO: 86902 - DNA, 247 bp, Glycine max
  Clone ID: 700952060H1
gtcgaagagaggagcggtggttcggcggggaacaagttccggatgtcgctgggtctgccggtggcggcgacggtgaactgcgccgacaatacgggggcgaagaacctctacatcatatcggtgaaagggatcaaagggcgtttgaaccgtctcccctcggcttgcgttggcgacatggtgatggccaccgtgaagaaggggaaacccgatctgaggaagaaggttttgccagctgtcatgttcgcca

SEQ ID NO: 86903 - DNA, 249 bp, Glycine max
  Clone ID: 700952061H1
tggaacgcgacaggcgcagggagcgaaacgagcgtttgcgcctcggcctcgacaccgccgacatcgacacggagtcggagcaggactacatgggcgtggggcccctcatcgcgaactcgagaaggagatgctcaaggaatcccccgagctgaaccgctacgaggagcccaccgactccgacgacgactccgacgaggaaaccaaggacgaggcggacaagaagatgagtgacttcgagaaaaaagagac

SEQ ID NO: 86904 - DNA, 186 bp, Glycine max
  Clone ID: 700952062H1
cagaaccttctcaaaaatgagacggtcatctctagtgagtgcccttcttatagcaaacattctcatggcaacacgccttaccctcactcttcctttctctcgctccatctctccactcttatctcgttccctttcacaactcaaacaattcccaaaatcccacccttgtcccctctggtcctcctc

SEQ ID NO: 86905 - DNA, 255 bp, Glycine max
  Clone ID: 700952063H1
gagaatacaactatagagaagtgaggcttccttctctgatagcagtggtgggcgagccagagctggggagggaaacaggggaaaggagaagaggaagggacataataatagccatagatcatggccccaataccaaacatgctttcgattgggctctggttcacctttgcaggctcgctgataccatccatctcgttcacgccgtttccgacttgcataaccaagttgtctacgacataacccaggtcttatgga

SEQ ID NO: 86906 - DNA, 253 bp, Glycine max
  Clone ID: 700952064H1
ctaatccaattcagacacgaaaaaaccaactacatcagctcatggcaacccccaaccccaccagattctcccttgccatggagagaaccgggcaatgggttttctccccagaaatccccaccgatgttattgttgcagttggacaaaccaatttttctctccacaagtttattctggcggcgaagagtaactacgtcagaaaagtgataatggaatcagaggagagtgacctaacaagaatagagtttccgac

SEQ ID NO: 86907 - DNA, 254 bp, Glycine max
  Clone ID: 700952065H1
agcatacttagaaacagcaactatgtctctcatgcagcttactagctcccctgttggctcactggtccgtttcattgtaatatttgctttatggtacagaaccatggctttggccaagttgccaccaaacgcttcatcagttccagcagttttagcgtttggagattccatcgtggacccaggcaacaacaacaacataaaaacattgatcaagtgcaacttcccaccttatggaaaggattttcaggaggaaa

SEQ ID NO: 86908 - DNA, 252 bp, Glycine max
  Clone ID: 700952066H1
gctaaaatcacttcatcatggcttcctcgtgtgcttcctctgccattgcagctgttgccatctccacaccaagttcccagaagaatggatcactcttgggaagcacaaaagcttcttttcttagtgggaggaaactgaaggtgaacaactttacagcaccagttggagcacgatccagcactacagtttgcgcagttgctgagcctgataggcctctgtggttcccaggcagcacccctcctccaggctaga

SEQ ID NO: 86909 - DNA, 250 bp, Glycine max
  unsure (1)..(250): unsure at all n locations
  Clone ID: 700952067H1
gtccggcatgacggcggtgaagccactggatttgatgccggtgaaacggagctccggcgaggacgcggcggatacggtgccgaaggagataaatctaattccgaatccgaagctgtttggcgtggcgattggagcgaacgngncgagagagggaggaggaggaagtggaagtggtcgagattgcggaggaggaggaggaggaggagaggaagataccctgctgcgcctgcatcacgtgggttctcagacg

SEQ ID NO: 86910 - DNA, 251 bp, Glycine max
  Clone ID: 700952068H1
ctgctcaagatctctttcgccagatccaacacttctgtggcgtatccctatgtttctacatcagaggatgtgcttttggaaaactcattgatttcaggatttgctgaagcctgtggagatatgggaattggcaatgttgctttccatggatcttgctccatggatggggcaaatcatgaagaaatcacaactttgcactcagttcaagactatttgatcaagaggatggaagagagtcacagaggaaaaca

SEQ ID NO: 86911 - DNA, 254 bp, Glycine max
  Clone ID: 700952069H1
gtactcactcgtgaaccccacgcagtgttcgataatcaaatcttctttctttttcttccgcagtcccaaccttcatggattctcactcacacatcattgcttggggctctggtgaagatggtcagctaggaatcggaagcaacgaagagaaagaatgggtctgcctcgtcaaagccctccagccccaccgtattcgctccgtcgtcgccggcagcagaaactccctcgccatcgctgacgacggaaattgttca

SEQ ID NO: 86912 - DNA, 252 bp, Glycine max
  Clone ID: 700952070H1
ctcaaccatcgaattgttggtgattgaaagagaaggaagaagaagcaggaaatggaagcagtgagagctggtcgagaaggagcaataggtctaggtcaaggtgatggcgtagccaaggacagcactgagactgaactcaccaaaatccgtctcctcagggcaattgttgaaacccgtgatccctcttccaaggaagaggatgattttatgattagaagattcctgcgtgctcgtgatttagattagagaagg

SEQ ID NO: 86913 - DNA, 250 bp, Glycine max
  Clone ID: 700952071H1
gtgcttcttcactttctctctccaacaactttcactcccaagctccatggccgcaaaccttttacccctttcaatttcatgctcctctaaaacccacattctctgtcttccctcccctcccaaacccctctttctctgccgccactctctgctccgttaccgttccactccgcgactcacatgtaaggcagcccaagtttcggtcgccgaagagtcgtcggcgtccggcgacaactgggttccgtggtgc

SEQ ID NO: 86914 - DNA, 252 bp, Glycine max
  Clone ID: 700952073H1
gaatgatttggatagtagcaatttttgtagtttctcttacttacctgtgtctatggagaagaagcaagaaaaagggaaagagattaccacctggtccaaaagggttgccaattttgggaaaccttcacaagttggggtcaaatcctcatcgtgatctgcatgaactagcccagaaatatggacctgtcatgtacttgcgcttaggatttgtgccagccataattgtttcttcaccccaagcagtgaactgtt

SEQ ID NO: 86915 - DNA, 248 bp, Glycine max
  Clone ID: 700952074H1
tgatgatgtgggagttgtgcggagtcttggtctacagcaattatctctgagttatcccaattccctaaagaaaaaaatactgaagaattgagcaaatctgatgccactaaaaagttggaactaatggatgactttctggaggtggagaaattggctcggttatcaaatgatttcagtggagtttcagttacttcaaacaatatggcaaatgaaactgtgaccaatgatgtatcagaggtagtactgag

SEQ ID NO: 86916 - DNA, 248 bp, Glycine max
  Clone ID: 700952075H1
gttaattaaaggttttatgcctatactgaactcactttaatgaacatcttgtagaatgtagattattaaactatatttttaattcaattgctactgctggcattgtactcatgtgtttaaatatttttgtagtgtattggagccacaacattagacgagtataggaagcacattgaaaaagatcctgctttggagagacgattccagccagttaaagtgccagagccaactgtagatgaaccatacaa

SEQ ID NO: 86917 - DNA, 246 bp, Glycine max
  Clone ID: 700952076H1
ctctagcgttgttgcattgcagaagcgtctccattttctttcgcgatggccgcgcgagccctgttgaccagaaaaaccctagccaccgttctccgcaacgacgcgaacccataatcggagctggcatagctgcagctactcattctcgtgggttgcacgtgtacacgctccccgatctggattacgactatggcgctctggagccagccatcagcggcgaaatcatgcagctgcaccacagaagca

SEQ ID NO: 86918 - DNA, 245 bp, Glycine max
  Clone ID: 700952077H1
gtaaaataataaatgatataacctaggagagagcttgtatgaaagaatagaatgacatgcggcaattagggttataacagagaactgtatgatctttttgaattttccagctcaggaattgtattcttgagaaacaaaagtgaaaactcaccactccacgggcaacactggtatacaagtaattggggagtaagtaattatgggatgacatctcttgaatctcaatgaaatgtaaaccctgcata

SEQ ID NO: 86919 - DNA, 246 bp, Glycine max
  Clone ID: 700952078H1
gcatttggtgctcattgtcgcctccagatccaactaactgcgttcaaccggacccagaaaaagaccctttttgcccaccaccccccttcaaagactacgagctccctccacacgatgacaagacattaccccttcgaattagaccagctgctcatttggtcactgatgattacatagccaagtacgaggaagccgtgaggcgcatgcaagaccttccacctgatgatcctcgcagtttcagcaaca

SEQ ID NO: 86920 - DNA, 250 bp, Glycine max
  Clone ID: 700952079H1
ctaaaacatctccagtgggttcttcttcttctattacaacaacgtcgtccaagaccatgaccatggccatggccacgatcctgctcctgttcacggtcttcgcggtttcatcggccctagacatgtcgataatctcgtacgacaacgcccacgccgccacgtcgcgcacgagagcgagctgatgtccatgtacgagcagtggctagtaaagcacggcaaggtgtacaacgcgctcggagagaggagaaga

SEQ ID NO: 86921 - DNA, 253 bp, Glycine max
  Clone ID: 700952080H1
ctcgtgcgaaaatgcgtgagattcttcacatacagggagggcaatgcggaaaccagatcggagcgaagttctgggaggtggtgtgcgcggacacgggatcgattccacggggaggtaccagggggacaacgagttgcaactcgagcgagtcaacgtctattacaatgaagcgagttgcggaaggttcgtgccgagggcggtgctcatggatctagagccagggaccatggacagcgtcagatctgtccctacg

SEQ ID NO: 86922 - DNA, 253 bp, Glycine max
  Clone ID: 700952081H1
cgtctttaccattatttattgtaaataaatacacagcttagattattagagactgaaataacaaaaggcaatggatctcagagagggtcaaactcaaccaatcttggatcctaaccaaccatctcatgtgtatcatctggctttggatattggaggatctctcgccaagttagtatacttcacaaaagatgatgatcatttggttgatggcgaggaagggatatctcatagaaaggctttggagaatccgaca

SEQ ID NO: 86923 - DNA, 246 bp, Glycine max
  Clone ID: 700952082H1
ttgtggcaaggttgatatgcaggagcaggaggttagtgatattactttgagagagagaagtgtttcggttgtcctattggctggagggcagggcaagaggatgggagctagcatgccaaagcagtatcttcctctttttggtcaacccattgctttgtatagtttccacactttttttcacctggttcaagtcaaagaaattattgtggtttgtgatccttcatacaaggacatttttgaaatgca

SEQ ID NO: 86924 - DNA, 195 bp, Glycine max
  Clone ID: 700952083H1
ttttccttctaaagggttggcacccccctaatcatgtgaagttcctttggccgaaaaagggtttcactgcaattttcttcacatgtaatcctgtaggcccagtagaactaaataatattttaagcttggcaggtctagtatgtgttatatacataataataataatatataataaaaacttgcatgttacccatt

SEQ ID NO: 86925 - DNA, 251 bp, Glycine max
  Clone ID: 700952085H1
atttcccttcctctctttactttctccacaccccaatttctacacacacactccccccccttcctacttactccaaagccaacaatccttaataggctttgagcaaccaccgagttcccttctcgggctcaaccacctaagcccgtctcagatttctcagatccaggcccagatcgaggcccaacagagccaaaaccagaacccacactctctcaactttctcggcccgaagcccgtcccaataagcacgt

SEQ ID NO: 86926 - DNA, 250 bp, Glycine max
  Clone ID: 700952086H1
cagcatttagccgagagaccaatgaaagaatatgcttcttgaatgtcagtcctgatgaagttataaggagtttgttttataataaaaataacgactcacttatcacagtctctgtctatgcatcagacaattacagttctttaaaatgccgaagtacaaggattgaatatataaggagggttaaaccggatgctggctttgctctttttgaatccgagtcattaaagtggccaggttttgtgagttcgat

SEQ ID NO: 86927 - DNA, 248 bp, Glycine max
  Clone ID: 700952087H1
gttcctccaccacgaacacacacgccctttccttccttcatcacctcgcgctaacctgcgccccctgcttaaattgcgcactccttctttatcccattctttcctcagattcggaaaaaaaaagctttccggtgctggggagcctagggttagggtttctgagagatgtgggatgttccatgcattgatgagccttatcgcgcgctgttggaagccgttcgggcacggtgacgacgccgtaatgccgc

SEQ ID NO: 86928 - DNA, 248 bp, Glycine max
  Clone ID: 700952089H1
atttttctctctttttcaactttcaattcaagcagctttggaaaaaccaaccagccaacgggttttttttttttcacctcctgaaatttgtgttggtttggtaatataggccttggagtgaaaattcaatattttgcatggaagccagagaaggtattagttctggggttacagtgataggggcagaagctccatcagcttaccatgtggctccgaggagtgaagctccaaaccaggttctgtccctg

SEQ ID NO: 86929 - DNA, 246 bp, Glycine max
  Clone ID: 700952090H1
tgcatgaataatctgatcttggtgggtggacacgtattgttgttgagaagccttttggtaaggatctggaatctgcagagcaactcagtacccagattggacagttgtttgaagaaccccagatttatcgaattgatcactacttaggaaaggaacttgtgcagaatatgttagtacttcgttttgcaaaccgattattcatgcctctatggaaccgtgacaacattgctaatgtgcgatcgtttt

SEQ ID NO: 86930 - DNA, 247 bp, Glycine max
  Clone ID: 700952091H1
gccgtagcagcggaagctctagcttgggtagcgaatcacaatggcgagaggattaaagaagcatctgaagaggcttaatgccccaaagcattggatgcttgacaaactgggtggtgcatttgctcctaagccctcatctggaccacacaaatcgagggaatgcctgccactcatactcattttgcgaaaccggctgaagtatgctctaacataccgtgaagtcattgctattctgatgagcgacatg

SEQ ID NO: 86931 - DNA, 246 bp, Glycine max
  Clone ID: 700952092H1
aaagtaactgattttggtcttagtgctttaccccagcatcttagggaagatggactgctgcatacaacttgtggaagtcccaattatgtagcaccagaggttcttgctaacaagggctatgatggtgcaacatcagatacatggtcatgtggtgttatattgtatgtaagcctaacaggatacttaccttttgatgatagaaatcttgtagttctctatcagaaggtatattcatatttgcctcta

SEQ ID NO: 86932 - DNA, 247 bp, Glycine max
  Clone ID: 700952093H1
atcaccttgcgaactccgccttctacaactctctcttctgctgcatcttccattcacagaacaagatccaccaccttctccttctcgctttgttccccaccaactcttcgcttcaattcccacagctccctctctcttactcgcgcttccgcttcctctatcactaccgcttcgaccactgagctggacgctgtgtcctccttcagcgagatcgttcccgacaccgtcgttttcgatgattcgaaaa

SEQ ID NO: 86933 - DNA, 247 bp, Glycine max
  Clone ID: 700952094H1
cagaaagaggaacgaagcaatggcgccgaagaagccccgaaccacgtcgaggaaccctgatttggtcaggggaattggcaaatattcgaggtcgcagatgtaccacaagaggggcatctgggccatcaaggccaaaaacggcggtgttttgcccctccacgatcccaagcccaaacccgaggccccggcccagaagccgcccaagttctacccggccgatgacgtgaagaagcccctcgcaacaagc

SEQ ID NO: 86934 - DNA, 249 bp, Glycine max
  Clone ID: 700952095H1
cctacctctccttcaaggttcgtagatttcttctgtttttttttcttcttctttattgtttgttctacatcagcatgatgttgatttgattgtgttttctatcgtttcatcgattataaattttcataatcagaagattcagcttttattaatgcaagaacgtccttaattgatgattttataaccgtaaattaggtctaattagagtttttttcataaagattttcagatccgtttacaacagcctta

SEQ ID NO: 86935 - DNA, 247 bp, Glycine max
  Clone ID: 700952096H1
ggaggagggaacttggagattggaatggaatacagaactgtttctggagttgctgggccattggtcattcttgataaagttaagggacccaagtttcaagagattgttaacattcgcttaggagatggtactactcggcgtggacaagtgctagaagttgatggtgaaaaggctgttgttcaggtctttgagggtacatctgggattgacaataaatttacaactgtgcaatttactggaaggtgtt

SEQ ID NO: 86936 - DNA, 273 bp, Glycine max
  Clone ID: 700952102H1
attcggctcgatgcgtagggggttgttattattcttcataatggttgcaacagctgctacggcgtcgtttctccctgtgccttcgccggacgctggaaaagggtcacccaagggtggtggtggcggcggcgtttctgtgaacctcggaggactcaaagagaagcaaggtttgtgcggttgcttgcaggtcaaggcaaacgcacaagcccctccgaagaccatggagaaggttgagaatgatttgccatggttgtcgtcgtcgtcgatttcgca

SEQ ID NO: 86937 - DNA, 170 bp, Glycine max
  Clone ID: 700952104H1
attgaaggctctacaggttctaggatttggtgagtacattgaagaagtttatgcagcatatgaacagcacaaactggagaccatggactctttaagagggggtggtggtggtggtaaatggaacaatggcagctgagatcgactcgaggaagatagcatatagcagacgc

SEQ ID NO: 86938 - DNA, 263 bp, Glycine max
  Clone ID: 700952105H1
atttcagatgaccagcaagacatcacaagaggaaagggtatggttgattccctcttccaagctccacaggagactggaactcactatgcagtcatgagctcttttgagtaccttagcactggacttaaacagtataacttggataacaacatggacggtttttacattgctcctgcttatatggacaagcttgttgttcacatcaccaagaacttcatgaccctgcctaacatcaaggttcctctcattcttggtatttgggg

SEQ ID NO: 86939 - DNA, 258 bp, Glycine max
  Clone ID: 700952108H1
cccaactactcttcttgatggctttttgataaggctgtatgtggcaccaaggaatggtttagacatttttatttgtttgatgttgaaggtggaggccaaagccacatctcagctgcttgattttcccctaatttctagccgccagaagaggacttgatattgctggtgttcctttgagaaaatactctaccggtgctggaagtgttcttgacatggtatctcctttgacacgacaacctttttctcccatctctttaa

SEQ ID NO: 86940 - DNA, 254 bp, Glycine max
  Clone ID: 700952110H1
aaaaacactcaatcaacacacatgattgaagtgcaagcaaatgccatggagcagagttggtgggccaatatgcctcacgagcttctcagagaggtcctcctccgaattgaatcgtcggagtccacgtggccgctgcggaggagcgtcgtggcttgtggcggagtgtgccgcacctggaggaggctcatcgtcaaggagattgtcaagccacctcaattctcttccaacataaccttccccatctctctcaaaca

SEQ ID NO: 86941 - DNA, 249 bp, Glycine max
  Clone ID: 700952111H1
gaaaacatgttttaaggattgataccacaaaagttggaaatggtgaagcctttgtggcagatgatcctctgagatgtcctgtggacaagctcattgatggggttcagctggtaggcacacatgatggggaggtgactgatttgtcgatgtgccaatggatgacgtatcgattggtatctgcgtcacaggatggcacgataaagatctgggaagatcgcaaggcacatccacttgcaattttgagaccac

SEQ ID NO: 86942 - DNA, 250 bp, Glycine max
  Clone ID: 700952112H1
agaaataagaagtttctctgctatttcttctacctataccgtgttactgttagttaaggcttactgagttgcaagattcacttcaaattatgcgtttcgctgatcggcttctcatcaaatcaaacgacgtcgcagttccttgattatttccttttgttgatccgtggaatcgcgcacacggtgttggtgtgtgctgtgaggtagaaagaagaatcctaaattgtgagcagcatgaattaccttcttggag

SEQ ID NO: 86943 - DNA, 252 bp, Glycine max
  Clone ID: 700952114H1
aagaggggcagtagccgagattccgtgagttgcaaaaatgaagacgattctttccaccgagaccatgaacatcccggacggcgtgagcatcaaagttcatgccaaggtcatcgaagttgagggcccccgcggaaaattggtgcgagacttcaagcatttgaatctcgattttcagctcattactgacgaaaacggtaaaagaaagctgaaaatcgacgcgtggtttggttctcggaaaacatccgccgccat

SEQ ID NO: 86944 - DNA, 249 bp, Glycine max
  Clone ID: 700952115H1
taaattttgaagccacacatactgacaaccgtgatattctgaagatatttgcagctgaaggtgttgagttccttttatcttgtgaagggaaggtacccgtgtcagaatgcaatgggaaaattatctgcctatttttcactgcaaactggtgcagaccttgcagagctttcgttccccgtcttgttgaactttatgaaacactgagaaagaggcgaataaatctagagattatcttcatctcctttgacc

SEQ ID NO: 86945 - DNA, 254 bp, Glycine max
  Clone ID: 700951702H1
atcaactgaggcagagctgcaggacatgataaatgaggttgatgctgatgggaatggtaccattgatttcccagaattcctgaatctcatggctcgcaagatgaaagacactgattcagaggaggagctgaaggaggctttccgcgtgtttgacaaggatcagaatggcttcatctctgcagcggagctccgccatgtgatgaccaatctcggtgagaagctgaccgacgaggaagtcgatgagatgattcgcg

SEQ ID NO: 86946 - DNA, 250 bp, Glycine max
  Clone ID: 700951704H1
gttacaagaagatatcagagtcaattgaatcagggaacaaattcaatagtaaatatttttttgggtcttgggagagagaataacagacatgttactgtaagtttgtaacaactatatagttatcatccgcacactcttttctttctttctttttcctttggtattgagggttgtaaagaagcttcttgtttgatatgtatgtaaatgatgtaaatgcccaagtcttgtacttattttcctgttaaattca

SEQ ID NO: 86947 - DNA, 249 bp, Glycine max
  Clone ID: 700951705H1
gttaaaacgacgcggagacggcgtcgtcggactcgacaacttcaacgactactacgatccgtctctgaaaaaagcccgcaagtccctcctacgccaagcatgacgtcttcatcgtcgatggcgacctcaacgacgccaagctcttggcaaagctcttcgatgtggtcgcgttcacccacgtgatgcacctcgcggcgcaggccggggttcgctacgccatggagaatccccactcctacgtccacagca

SEQ ID NO: 86948 - DNA, 133 bp, Glycine max
  Clone ID: 700951706H1
gcaacaagagcttctgatccgcgtcgccacgctctccctcatctacgtcctcgccttcatcacgcgcctcttcagcgttctccgctacgagtccatgatccacgagttcgacccctacttcaactaccgcacc

SEQ ID NO: 86949 - DNA, 243 bp, Glycine max
  Clone ID: 700951707H1
tacaatgtcattgtggaaattgccactatcctctccccggaagagcttttggcggttagacgcgcctatctcaaccgctacaagcactccttggaagaagatgttgcagctcatacctctggccatctacgccagcttttagtggggttggtgaccgcattcaggcatgttggtgatgagatcaatccaaaattggcacaatctgaggctgaaattcttcatgatgctgtaaaagagaagaag

SEQ ID NO: 86950 - DNA, 245 bp, Glycine max
  Clone ID: 700951708H1
gccttgttcagcttcatattcccaccaccatcttctctggtggtttcggggatgtcagtgataagccttgtgtcactggctaatgctggcttctcagagattagagggaagcatttgaactattcaaagttttggaatgctaatccctctgcagaaaagcaggtcaagttgtctagcaaagctggcatgcttttgctgtacactcctgcttttcttgctggccttgcatccttctggatctttcc

SEQ ID NO: 86951 - DNA, 246 bp, Glycine max
  Clone ID: 700951709H1
aaccaattggcctcaagtttgagaacccaagagagggtgaagaaggccaaacctggtgttgtttctgctgttcttacatcaagtaacaccaaagaatcagtggcttttcaaatgccatcgtttctcagaagaaaggctgatccaaaaaatgttgtttccatcatattgggagggggacctgggattcaactctttcctcttaccaagcgagctgccacacctgctgttcctgttggtggatgctac

SEQ ID NO: 86952 - DNA, 246 bp, Glycine max
  Clone ID: 700951710H1
ccggaagcaacagaggaaggagcctgagaggcctctttatcaagtacttgaagagaaggaagaaaaaattgcccctggaactttgcttggaaccacacacacttatgtggttggcactggcacacaggacaaatcaggtgctaaaagggttgatttgcttagaggtcagaagacagataaagtggatgtcactttacagcctgaagagttggaagccatggaaaatgttttgcctgccaagtacga

SEQ ID NO: 86953 - DNA, 247 bp, Glycine max
  Clone ID: 700951712H1
ataagttggtggattttgagcaccatcttagcaatgtttctcagcaggctgaatcccttgtcaagtttcagcaagacatgggtgaaacggttggtgaattaggtctggcttttgtaaagcttaccaaatttgagacggaagaagccatatttgagtctcagagagttcgagctgctgacatgagaaatgtggcaactgcagctgttaaagcaagcaggttatatagagagctgaatacacagacaat

SEQ ID NO: 86954 - DNA, 246 bp, Glycine max
  Clone ID: 700951713H1
agcaagctggttatggctatgtgcaacctggagcatactctggtccatcaccccagtataacatgcctcagtaaccatatgcaggctatcctgcccagcaacctggtggatattccaccaattgggaccagtctactgcaccacctccaccagcagtctactcatggtggtggttatgattactatagtcaacagccacagcaaccacaaaatcctgggggtactgcacctccagctgatggctct

SEQ ID NO: 86955 - DNA, 247 bp, Glycine max
  Clone ID: 700951715H1
attgtgatttatcagatggattttctgaagatcctttgcgtcatctcccacctagcaaggtgccacaccttcattgttttattcagaggaaattagcggttcacgacttccttcagcacaatcctattgtagagccaaggcccaacttggtcagaggaatcagggaagcattgctaaggcatctcacggctgttcttagcaatgatgatttggctactcatttcatgttgctgcatcttctatccaa

SEQ ID NO: 86956 - DNA, 252 bp, Glycine max
  Clone ID: 700951716H1
gaagatgcgagcacttcattgacagatcgagcagcaaaactacgtcaaacagcggctcttatagaatgcaacctaaagcttcttggagcaactggaattgaagacaagctacaggagggtgtaccagaagccattgaatccctgcggcaagctggaatcaaggtctgggttcttaccggtgataagcaagagactgcaatttcaattggtctttcttgtaaacttctgagtgcagatatgcagcaaataatt

SEQ ID NO: 86957 - DNA, 258 bp, Glycine max
  Clone ID: 700951717H1
agaaaacctctcgttttctttttctctctctaaaacacgatttccaattttacttctctagaaatgggaacagcaatacttcgttcccacgattgcctccaaggccggttcctccacaacgaagccgtgacgatcgccacgtcacgtgttgcatcgcgaagaaaccataactctaacaacaataaccataatagcttcgcctcctccgcaaaccagaattgcccgccggaagcggagtccggtcaccgatcgagagcg

SEQ ID NO: 86958 - DNA, 252 bp, Glycine max
  Clone ID: 700951718H1
aaattgctggggttctccacctcacaacccaaccccaacaactaccggtaaccttagtacaggtacgacggggacatctcaggcgatcagcagcggtagctatactactactactacgacgactactacttcttctggaagtgggagcagctccataaatagcaagttctcagtgtcaagcggtggtcagccttatccaaatggacagatcttacctacctctaatttgaggatcttcacttttgccgagtt

SEQ ID NO: 86959 - DNA, 250 bp, Glycine max
  Clone ID: 700951719H1
tgagagaatgagtacggtgggagaagggaaggtgagtagtaatggtcatggatgttgcaaatcagggccaggctatgcttccccactggaagccatttctggtcccagagagtctctcatttatgtaacctctgtctacacagggaccggaatagagaagccagactatttggcgacagtggatgtggatccaaactctccaacttattccaaagtcatccataggcttcctgttccttatttaggtgac

SEQ ID NO: 86960 - DNA, 245 bp, Glycine max
  Clone ID: 700951720H1
gggatcctgaaacgggagaaggcttgaccagcattgaaccgacaacgggaacaataaatgacgtgtgtacatttcctggcagtggtttgatcttgctggccttagattgtagtcaaataccatcttacttcataccatcgcttggacctgctcccaagtggtgttcttcgctagagaatttcactgaggagttagacatgggtggacaaacaactatttatgatcattacaaatttttgacaaag

SEQ ID NO: 86961 - DNA, 248 bp, Glycine max
  Clone ID: 700951721H1
acctgagcatgtggagaaagctttgaagcatgtttaccatgcgtcaacaaacaaaaccaaaggaaaggaattggagcttttgttagcaatattgccggacaacaatggttctctctatggtgatatcaagcgtatttgtgaaaccgaccttggtttaatttctcaatgttgtttgacaaagcatgtctttaagatcacaaagcagtatttggctaatgtgtctctgaaaatcaatgtcaagatgggag

SEQ ID NO: 86962 - DNA, 245 bp, Glycine max
  Clone ID: 700951722H1
gagagagagagagagagagagagagatctatctatctatcaagatggcgttgttggttgagaaaacaagcagtggaagggagtacaaggtgaaggacatgacgcaagccgatttcggaagattggaaatcgagctggcggaggttgaaatgcccggcctcatgtcctcccgcaccgagttcggcccctctcaacccttcaagggcgctaggatcaccggctccctccacatgaccatccaaaccg

SEQ ID NO: 86963 - DNA, 244 bp, Glycine max
  Clone ID: 700951724H1
tattaggccttccttaccgtgatgagaccgatgataaagttacaattgaaagtgcggaacaactctcaagtataatgtggcaattaagtgcgcaactattactccagatgaagctcgtgtgaaggagtttggtctgaagtcaatgtggaagagtccaaatgggacaattaggaacattttgaatggaactgtcttcagagaaccaattctttgcaaaaacattccccgccttgttcctggttgg

SEQ ID NO: 86964 - DNA, 244 bp, Glycine max
  Clone ID: 700951725H1
ttaataattagcacatagttttttggaagagttgtgaaaatgggacttgtggagctttttggagtggcatctatgcccgtgatcaaagtactaataatcactgcagttggcttgcttcttgcactggataacgtaaatttgttgggaaaagatgcaaggatacaagtgaatcatcttgtgcattatgtgttcaatcctgcactggtgggtggcaatttggcggacacgattacttttgagaatg

SEQ ID NO: 86965 - DNA, 116 bp, Glycine max
  Clone ID: 700951726H1
ctcgtcactagctctgtgcattcttctctcgctctctgccttccatcacactcggcatttcctttcccaagatagtagaagatggcagacactgaggatattcaacctcttgtttg

SEQ ID NO: 86966 - DNA, 246 bp, Glycine max
  Clone ID: 700951727H1
agaaaactcaagctcccagattctgttccaatgcctcccgtaccaatttcccccatcaaagttgggcacattgatgatgtccaagagctaagaaaaaccaagccaaggacaattcctcaaagatttgtacgagacttgacagaaagaccaacactcactacacctcttcccccaccacatagtgacatgccagtcattgatttctctaagcttagcaaagggaacaaagaggaagtcctcactgaa

SEQ ID NO: 86967 - DNA, 245 bp, Glycine max
  Clone ID: 700951728H1
tggcatagttaaaaatctcatagttacagacagaaatcctgttgcactttaataaattaaatgaaaagatttttcaatgttgcattactgtacttgtccaaagaaatacatttctgacggagacattgtttggaatatatacactttcaggtgatgggtatggtttggatttcaaatgtctttcttctcgggtaatgagatgcatcaagttttgaagtacagtgagcagggatggacattgctgc

SEQ ID NO: 86968 - DNA, 247 bp, Glycine max
  Clone ID: 700951729H1
cgagtacttttcgttcttgatctgttggttacgatgtcgtattcaaggagatctaggtattctccttctccttctccttctccatacaagcgatacggtaggtctgtgtccaggtctctctcaatatcaagatccagaagccgttcaaggagtttatcaagagatgcagaaaatccaggaaacaatttgtatgtgacaggattgtctcctaggattaccaagagagaactggagaaacattttgctg

SEQ ID NO: 86969 - DNA, 248 bp, Glycine max
  Clone ID: 700951730H1
taaagcgggttactgtctgttcaagctaccatctctctctctctttcttagtgcctccttgccagaagttaaaatggcccaagaaactttcctattcacatctgaatcagtgaacgaggggcaccctgacaagctctgtgaccagatctccgatgctgtgctcgatgcatgcttggagcaggaccctgacagcaaggttgcctgtgaaacctgcaccaagaccaacatggtgatggttttcggagaga

SEQ ID NO: 86970 - DNA, 251 bp, Glycine max
  Clone ID: 700951732H1
tgttgttttcagatcaaaaggccttctttcctcatttcggacgcacgctccccatccatgtctacttgtgtaaaatcccgagatgtttgtattgttggtgttgcacggacgccaataggtggtttacttggcaccctatcatctctttctgccacagagttaggctcaattgctattaagactgctctcaagagagcaaatgttgatccatcactcgtgcaagaggtgttttttgggaatgttcttagtgc

SEQ ID NO: 86971 - DNA, 97 bp, Glycine max
  Clone ID: 700951733H1
ttcaccttcagcccttccttttttgcgctcattctgttttcaaaggcttctttttcctcatgttgcagtgacgaacttctgaagacatggcaaatca

SEQ ID NO: 86972 - DNA, 250 bp, Glycine max
  Clone ID: 700951734H1
attttcatcatcttcttcttctttttcatcaatcatcaccagtggttcttttccttctgagaagatcgaattgtgttttgcaaaaatgggagttccagagaaagaccctctttcccaattgagtttgcctcctggttttcggttttaccccaccgacgaggagcttctcgttcagtatctgtgccgcaaggtcgctggccaccatttctctcttccaatcattgccgaaattgacttgtacaagttcgac

SEQ ID NO: 86973 - DNA, 248 bp, Glycine max
  Clone ID: 700951735H1
gcccatacttgtgggagatagatggcacgcttgtcactgctcattttcgcgttctgcgccgtcgccgtcgccgtcgccgtcgcgggctcctccttcgatgatgccaaccctatccgtttagcgtcggacttggagtcgcaggtgctggacgtgatcggacagagccgccacgctctctccttcgcccgcttcgctcgccgccacggcaagcgctaccgttccgtcgacgagatccgcaaccgcttccg

SEQ ID NO: 86974 - DNA, 246 bp, Glycine max
  Clone ID: 700951736H1
caattaacaaactctaacaacatcatggtgcaatcaaagaagttcagaggtgtcaggcaacgccattggggttcatgggtatccgaaattcgccacccgcttctgaagagaagggtgtggctagggacatttgaaacagcagaagaagctgctagagcctatgatcaagctgcgattctgatgagtgggagaaatgccaagaccaatttcccaataactcaaactccagaaggtgatccaaagagc

SEQ ID NO: 86975 - DNA, 242 bp, Glycine max
  Clone ID: 700951737H1
gtgagattcatcaattttgaaagaacaaaacttcctgaagaaattctaaagcataatctagaagaaaaaagaaaatatttttcagatataattcttgaagttgaaaggagtgatgccgaggttcaggctgagggagtatacaaccaaaggcttcagaatcttgctgtcactcttgataaggtaaggtatgttatgagatgtatttttggcgatccacggaaagcaccacctcctcttgagaa

SEQ ID NO: 86976 - DNA, 240 bp, Glycine max
  Clone ID: 700951739H1
cactgtcctcgctcaaggaatcacctttctagatcacccagtaacaattctagcaaagcatgggatgatgcttctttggattcaggctctgaccaagtgggttcatgcacaacaaaggatatgcttggcgccctttacttacagtactctgagaactctccaccttaccagcgggttccattttctgagaagataaccgagttagctaaaagccatccaggattgatgaggttgaagagt

SEQ ID NO: 86977 - DNA, 244 bp, Glycine max
  Clone ID: 700951742H1
cggcagtgaagttattagaatctgtgttgtgttgtgttgtgttgagcagagagagagagtgagggataagaagagaatagggttagggttagggttagggttagggtttgattgaggatgccgaagaacaagggaaagggaggtaagaacaggaagaggggaaagaacgaggcggacgacgagaagcgggagctggtgttcaaggaggacgggcaggagtacgcgcaggtgctccggatgctgg

SEQ ID NO: 86978 - DNA, 243 bp, Glycine max
  Clone ID: 700951743H1
cgtatttgattggtcggtcatagcaattagcaactccacccttcaaacttgaaaggaaaaaaggactttggttatccacgccacaccacgctgtaattaactaaactttctagaatcttcttctctcgccatggccgcgccgtcgtcctccgccgcggcaaacatcatgctggcgatctccgagaagaagacgaacagtgtagatctgtatcgccctctccgcaactacgtggccttccacta

SEQ ID NO: 86979 - DNA, 243 bp, Glycine max
  Clone ID: 700951744H1
ccaagccccactcaaccaccacaccactctctctgctcttcttctacctttcaagtttttaaagtattaagatggcagagacattcctatttacctcagagtcagtgaacgagggacaccctgacaagctctgcgaccaaatctccgatgctgtcctcgacgcttgccttgaacaggacccagacagcaaggttgcctgcgaaacatgcaccaagaccaacttggtcatggtcttcggagaga

SEQ ID NO: 86980 - DNA, 245 bp, Glycine max
  Clone ID: 700951745H1
cttcaccttcacaattagaaaaaaaaaaaaacaaaaaatgggcgtttctcgttctcaaaagcctcatgttgtttgtgtgccattcccagcacaaggccacgtgaacccttttatgcaactaagcaaactccttctttgcaccggtttccacataccctttgtgaacaccgagttcaaccacaagcgtttggtgaagtctcttggacaagaatttgtcaagggacaacctcattttcgatttgaga

SEQ ID NO: 86981 - DNA, 244 bp, Glycine max
  Clone ID: 700951746H1
cttattgtcttgtctcaaaatggtggatcaaatagaggaggtttcaatatagtatcttcaagtgccaaaagcagcattcatctggatggactattcaacattatctcatacgatttggtgccaaagctacagaatatgcttatgacatgtaactttaaggttgtgattgctgatgagtcacattttctgaaaaatgctcaggcaaagaggacaactgcttctcttccagtcataaagaaagctc

SEQ ID NO: 86982 - DNA, 248 bp, Glycine max
  Clone ID: 700951747H1
tagggaagatagtcaatggatgtttagtcggctggggaagcagtggtggagagttattgtttatttttctaacaggaacataatagtatttgaggcactgaagtttttgtggagcatttgtttgttgcatttggggggtttggagaactctgtggctcttccgctgttttctagataattttttatgcgaaagatatatcccaagtgttgaacggcttgagaagcggaacgggcaagtcagccaaagc

SEQ ID NO: 86983 - DNA, 128 bp, Glycine max
  Clone ID: 700951748H1
ctctctctccctctttctcgtcactagctctgtgcattcttctctcgctctctgccttccatcacactcggcatttcctttcccaagatagtagaagatggcagacactgaggatattcaacctcttg

SEQ ID NO: 86984 - DNA, 248 bp, Glycine max
  Clone ID: 700951750H1
gaggaacaacacttgttattactctttcattggtgctttcgacacttgtgtccttctccactttcacacatgccttctctacttctgcgtttccggaactgaatcctataaaacctaggcactcacgtcttctcaggagtgccgtgcaacatgaaactcctacatcacagctttctgaaatatggtcacctctggaaagccaaggacggaaaccttatgttgaatcagataagccatcattaccagag

SEQ ID NO: 86985 - DNA, 248 bp, Glycine max
  unsure (1)..(248): unsure at all n locations
  Clone ID: 700951751H1
attgtgccctccctctttctagctatttccctctcttaacacaattaacaaagatatatcatatcatatcaactccaaatgatgaaaaatattgggttgtttcttcttgtggtggtggctacttttgtggtggcagccacagctggtagcttttaccaagactttgaaataacatggggtggtgagcgtgccaaaatctatgaaaatggaaatcttctcaccctctccctagacagagnctctggctc

SEQ ID NO: 86986 - DNA, 242 bp, Glycine max
  Clone ID: 700951752H1
gacctaccaagaagaaaaagcttgactgggagctgcgtctaaaaatagcacttggagcagcacaaggacttgcttatctacaccatgattgctgtcctagaatcatccacagggatgtgaaatcatctaacattatattagatgcagactttgagcctcatctcactgattttggcattgccaaaagtctctgcccctcgaagtcccatacttctacttacataatgggcacaattggctac

SEQ ID NO: 86987 - DNA, 241 bp, Glycine max
  Clone ID: 700951754H1
cttggaaccgttcttcgtgttctccattccctctctcactccttcatctacgtaatttccttccttcctttctttctttctttctttctttatcttctcatttttctcaatacaatttttttctttctttctcaagttttgctacttttctcttcttaaccatagttcacatattatatcatcacatatcatagtgatatcatatcacaatgtgtggcatacttgctgtgcttggttgctc

SEQ ID NO: 86988 - DNA, 240 bp, Glycine max
  Clone ID: 700951755H1
tcctaagaatgttgagcatcctcttttacaggcttcctttggtgtatctccttcgggtaggatgtcaccaagaagtgttgaaccaatctctccaatgagctctcgcatatcggcatttgctcagcgcgaaaaacagcagcagcagcagcagcagctgcgcagtctcagttcgagagacctcggtgccaacagtcctgcctcacttgttggctcccctgcaaacccttggtcaaagtgggg

SEQ ID NO: 86989 - DNA, 239 bp, Glycine max
  Clone ID: 700951756H1
tgcaattgaagttaaaagccttagccttccctacaactccaaacacaaagacatcatcatccatggctgcctccgtctccactgtcggagctgtcaacagagctcttttgaacctgaatggttctggagctggagcttcagctcccagttcagccttctttgggaccagcttgaagaaggttattgcctcaagggtccccaacagcaaggtttccggtggaagcttcaagattgttgct

SEQ ID NO: 86990 - DNA, 242 bp, Glycine max
  Clone ID: 700951757H1
ctcagaagaagacccttccaccgggcccaccgggctccctatcttcgggaaccttctatctcttgacccggacctccacacttacttcgccgccctggcccagatccacggcccaattctcaagctccgactcgggagcaagctcagcatcgtcataacctcaccggccatggctcgcgaggtgctcaaagagaatgacaccgttttcgccaaccgcgacgtccccgccgccggaaggtcag

SEQ ID NO: 86991 - DNA, 244 bp, Glycine max
  Clone ID: 700951758H1
attaacaaatcatagcatagcagaagaagaagaagaagagatacatagaaagaaagaaaaaaaaaatgagtttgagggaagacaatgaagagggaagggatctgaagaagccatttcttcacacgggaagttggtatcgtatgagtgggagacaatccagtgtgttcggttccacacaggccattcatccagtcctccatctctgtctttgcttgtgttctaatcgttgctttgggtccaattc

SEQ ID NO: 86992 - DNA, 241 bp, Glycine max
  Clone ID: 700951759H1
agacggagtggctcgacggaaagcacgtcgtgttcggacaggtcgtcgaggggatggacgtcgtcaaggagatagagaaggtcggatccagctccggcaggaccgccaagcctgtcgtcgtcgccgactgttgtcaactctcttagatagacgacgttgaccctaggcttttatctctgtgtcggtggctctgaatgtgtcgtttctttcggtgtcgtttttgccttttttttctctttcc

SEQ ID NO: 86993 - DNA, 243 bp, Glycine max
  Clone ID: 700951760H1
ggaatttgtctaagtgattttcacttttattggtttgcagagatattgaaagtcctcatggaggcctttcctgaaatttcaatgactgttgatctgtcgaacactactgtgttgcatactgctgcagcacaaggacacattgaggtagtaaattttctcttggaaaaaggtaatagcctggtaactattgcaaaaagcaatgggaaaactgtgttgcattcttctgcaagaaatggctacttg

SEQ ID NO: 86994 - DNA, 243 bp, Glycine max
  Clone ID: 700951761H1
ttccaatatattccattctctctgtgtatttccctacctctcccttcaagatgcagatcttcgtcaagaccctcaccggcaagaccatcacccttgaggtggaaagctctgacaccatcgacaacgtcaaggccaagatccaggacaaggaaggaatccccccggaccagcaacgtctcattttcgccggaaagcaacttgaggacggccgtacccttgctgactacaacattcagaaggaga

SEQ ID NO: 86995 - DNA, 244 bp, Glycine max
  Clone ID: 700951762H1
cgtttaccatgctttcctaagagaaagagaaaagtaaaacccctcactactgatagattttcattcctccgaggaaaaaaaaaacatgtcggatgctttgatcaatggattggccggagctggaggagggatcattgctcagctcatcacatacccacttcaaactgtaaacactcgccaacaaaccgagcgtgatccgaagaaagacacgaggagtcaaggggccctcgaacgaatgtgccag

SEQ ID NO: 86996 - DNA, 247 bp, Glycine max
  Clone ID: 700951763H1
cttccgtttctttttctttttctctctctctagggtttcgaaaatgttctccggctcccagttcgacgccaccaccgccttctccggcggcggtttcatgtcttctcagccgtctaccctcaacgattcctctcccgcgccgtcaaaaagccgcgaaactcagggtttggtgccagtgacagtgaagcagataagcgaggcctctcaatccggtgatgaaaagtcgaatttcgtgatcaacggtgta

SEQ ID NO: 86997 - DNA, 244 bp, Glycine max
  Clone ID: 700951764H1
tctcccgaagataaggcagagaagagaaggagagaggcttgtacctggagagaaaagaggagacaataatacatggggaagcagggtctaaacacggtggagcaacaatctgtggcaccgacagcatccaagtttccgttgagcttttgggaagccacggtggcttcaacggtggcgctggtttttgcggtgggtcttctcggcgtgtacctcaccatgcccgattccgattacagcttcctta

SEQ ID NO: 86998 - DNA, 247 bp, Glycine max
  Clone ID: 700951765H1
aaacctcctcactaccctaaaccaccagttcatccacatccaccccatgtcccaaaacctcatccaaagcctccagtgcatccccatcgaccttatgtcccaaaacaacaattggggcagtagcaccagcatatgttccaaaaccaccaattgtgaaccctccctatgtcccaaaaccgcctgttgtgccagttacaccaccttatatccctaaaccaccagttgtgacaccagcatatgtccctaa

SEQ ID NO: 86999 - DNA, 244 bp, Glycine max
  Clone ID: 700951766H1
ggaggagagagacagttcaatggccttgttgatgtctacaggaagacattggcatctgatggtgttgctgggctctaccgtggtttcaacatctcatgtgttggaatcattgtgtatcgtggtctgtactttggattgtatgattccgtgaaaccagttgtcctcaccggatcattgcaggatagcttttttgccagctttgccctcggatggctcatcaccaatggtgcaggtcttgcatcat

SEQ ID NO: 87000 - DNA, 245 bp, Glycine max
  Clone ID: 700951767H1
ctgcattcttttaatgtgccttctaagttccttctcacccccaatcaacgctcttctcaacctcactttaccccaccaacaccctcaccccgaatccgtcgtccacgatctccaacggaaggtgaatgcctcactatggagaagggaaatgctgtcaaaggaggaccaacaagaaggcatgtcgtcgtcgtcgtgtctgaccggaaaccccatcgacgactgctggcggtgcgatccgaactggg

SEQ ID NO: 87001 - DNA, 244 bp, Glycine max
  Clone ID: 700951768H1
gtttatttcattttatatttcttctttcaccctatgtttggatgcagagaaagaaaagaggagtaaagaaaaaaaaattgattttaaaattctgttgtttggttgaaaagaaagtagagaggaaaaaatatctagaaaacaaaattttgtatgtgttatcttcatttcatatttcaaaatttttgctctctcctattgtttccactaatcagaatttagtctaaatgaatactgaattgaggaa

SEQ ID NO: 87002 - DNA, 241 bp, Glycine max
  Clone ID: 700951769H1
ggtcgccttgtcacccaccaaacccatgaccctcccttctatgctgttttcgttgattgcaacaacagtgatggagccagattcatccatgcaactttagatatgaccatatctgatatcctctctcccgttgacgttccacccattgttcaatcattgtttgaccaccacaaagctgtcaaccatgacggtcacacaatgccgttgttgtccgtccaagtcactgaatttgtggatggtg

SEQ ID NO: 87003 - DNA, 237 bp, Glycine max
  Clone ID: 700951771H1
attaaagctccaggaaaatggtcaccatattaggaccctctttctctttctctctcttttttctcatacacagttcgtgacactcctttttcatgtttggggactctcttctgggctttcttcggtttaagccttagaagacggagattattaaaacatgggttgctttcgttgcacaggcaaatcaagcaaagaaaccaacaacaataacattaatcacgccgagaagcacaccat

SEQ ID NO: 87004 - DNA, 237 bp, Glycine max
  Clone ID: 700951772H1
cgatcatggcttctatatcctgtctatcctctttctccctctccaatttctctgcacctcttcccatttccatttgttcttcatcttccaccttcctaacttcccaaataccatgcaaacccaccaaacgtagcaaaccaaaacgccaccacgtttcgaaagtgacatgcaacagtaaccaaaacaccccaacaccaaacccagaagaagaaagaccatcatacaacattctaggaa

SEQ ID NO: 87005 - DNA, 242 bp, Glycine max
  Clone ID: 700951773H1
ctttctgacttcagccagaaaaattcaattacagaatccactgacatgttgcacaatgggaatacatcaaatctgaacatgatgtccagctcagcaggaaagcctttgcaagcagatggccataccattgatgatggatttgccccgccacagacatacaaacagttgcctgatacaacaattaaggtgaatccaaagttatcacagcatgtgaattctgagtcgaagcaagtgctagaaga

SEQ ID NO: 87006 - DNA, 238 bp, Glycine max
  Clone ID: 700951774H1
agtcgccttaggatgaaacggcttgggcggatttgctgccgaggaagttattgtcagaacagatccaacatgactggggggtgatgtataggaagattaagaacatgggtgtgttcaagtcaggtgaaggatttctcaaagaagtgcctcttcaggatgtgaggttgcataaggattccatccatagtagagcaaagcaaacaaatttggaatatctgttgatgttggatgtggacag

SEQ ID NO: 87007 - DNA, 239 bp, Glycine max
  Clone ID: 700951775H1
cttttgttccaaacaaaaacgtatgaattggtcggtttttctccggagtcgtcttcacttttctccgagtttttattatcatcatctctctcgtgtccctgtctccatctccatctcttagtttcttcttcaaatggcagaagttgaagacatagacaaccctcatcacgaccaccatcattacctttcttcttctacaacacaacctccaatgatcaatttcccgcgagatctgttaa

SEQ ID NO: 87008 - DNA, 240 bp, Glycine max
  Clone ID: 700951776H1
gggaaggttgatcaaacgctacgcagcggacgtgacttggtagggcatggcacccacacactgtcaacagctggtggtaattttgttcctggtgcaaatgttgaaggtaacggcaatggtactgctaagggaggatcccctagggctcgcgttgttgcctacaaagcatgctggaataaactggatgaaggagggtgctatgatgcagatattctagaagcatttgatcatgccatttat

SEQ ID NO: 87009 - DNA, 239 bp, Glycine max
  Clone ID: 700951777H1
caggaataaatgacttccctatgactactattgaccatatcaaggcgggattgcctgtgttagcaaaatataaaaggccgatagttgtgcatgctgaggttcaacaagattttgaaaaccatttggagcttaatgaggataaccttgatccacgtgcttacttgacctatctcaatgccaggccaccttcatgggaggaggcagccattaaacaacttgtaggtgttacgaaggacaca

SEQ ID NO: 87010 - DNA, 241 bp, Glycine max
  Clone ID: 700951778H1
gcaagagctgaaagagatcccgaagcagaggcttcgaaatcgaacacttgcgaggaatgtggtgccactttcaaaaaacacgcctatttgttgcagcacatgcaaagtcattcacttgaggtatttgaactcttgattaattattatttaagaaaaataagttggatacagtcaaactctaaaagcacataagaaaactgtatttaaaagctatgtcttatagaccgttgtgttccttgag

SEQ ID NO: 87011 - DNA, 242 bp, Glycine max
  Clone ID: 700951779H1
gtcctcttttctcttctccctttttctctctgtctctctctctcggtctcgctcttcttctcatcaagcacagagttacagactcaccgatcttccgattctctttcgtcttggtttatgagctcgaaggagagacccactcttggtggcacgcggattaagacccgcaaacgaaatattgctgcgccgctggaccctgcagcattctcggatgcagtggtccagatttatttggataatgc

SEQ ID NO: 87012 - DNA, 245 bp, Glycine max
  Clone ID: 700951780H1
cacatatctgcacttcacaaccctccaaacaacatttaactttatataaaaccatcattctgaacaccatgtttactctcttcttctctcttcttctacattagttcttgttattcattattcattctcagcttcttttcttctggggggcaaaaggggtcacttttcagatccgagattgagctcctttacccatcatcatcatggagctcctcgggtacctgaatcagggtcacccttctaga

SEQ ID NO: 87013 - DNA, 247 bp, Glycine max
  Clone ID: 700951781H1
gaccattacaagtatatattacaaggttatctcttggttattttattgaatgttaaactttattatactactacctgcaatattattcagcttattcttatgaaattttattaaatattgtctatgtacattggttttttggtcttgtttcatgaatcatggttgaggttttacctgtttattgttgattgtttgtatttcctgcacataatacatacatgcatctgaaatatgaaaaaaattctaa

SEQ ID NO: 87014 - DNA, 242 bp, Glycine max
  Clone ID: 700951782H1
ggaaatttgcaaggggctcgacaaattcgttattggacaagagagggccaagaaggtgctttctgtagcggtttataatcactataagaggatatttaatgaaacctctttgcccaagtggcctgcaggagattcagataatagtgtgaaagttgatgctgctgatgatgatagagttgaacttgagaaaagcaacatccttctaatggggccaaccggatcagggaagacattacttgcca

SEQ ID NO: 87015 - DNA, 253 bp, Glycine max
  Clone ID: 700951783H1
tgttacaagaagatatcagagtcaattgaatcagggaacaaattcaatagtaaatatttttttgggtcttgggagagagaataacagacatgttactgtaagtttgtaacaactatatagttatcatccgcacactcttttctttctttctttttcctttggtattgagggttgtaaagaagcttcttgtttgatatgtatgtaaatgatgtaaatgcccaagtcttgtacttattttcctgttaaattcaag

SEQ ID NO: 87016 - DNA, 144 bp, Glycine max
  Clone ID: 700951784H1
gggagtgaaccgatgtaggtgagcatttattaactgtaagatatgggaagatcaaatttaaataaagtgatttctggcggggcatgtaaataatgccctagggagtttgtaattattgtttatgatactatttctttgcaattc

SEQ ID NO: 87017 - DNA, 237 bp, Glycine max
  Clone ID: 700951785H1
gtgaagctactctcagacatagatgaccaagatgggttacgtttccaaattccggtgatacagttctatcgccacgacccatcaatggcagggaaagaccctgtcgatgtgataagaaaggctgtggccaaaacgcttgtgttttactcaccttttgcaggtaggcttagggaaggacttggtcggaaactgatggtggattgtactggggaaggtgttttgttcattgaggctgat

SEQ ID NO: 87018 - DNA, 235 bp, Glycine max
  Clone ID: 700951787H1
aagagaaagagtgggagaaagccttagagagaatttttttcaaaaaagaaaaatattccttcttaattctacgtacgtgaggtgttagaagacacaacaatgaatttggcaaagggtgttggcggaaacattgacaaatcccaagttctgtccgctgttgaaaagtacgagaagtatcatgcttcttatggaggtcaggaggaggagaggaaagctaattatgttgatatggtta

SEQ ID NO: 87019 - DNA, 239 bp, Glycine max
  Clone ID: 700951789H1
gcatgttgttgatgttgggactatgcttcctattgttctctgcatttccacttgcgttctctgagagatgccacccacaagacaagaaagcgttgctccaactccagaaggacctcggcaacccttatcacatcatatcctggaacgcaaaggaggattgctgcgagtggttctgctgcgttaagtgtgacgagaaaacaaaccgcgtcattagcgttgccttatcatccccttttcca

SEQ ID NO: 87020 - DNA, 62 bp, Glycine max
  Clone ID: 700951790H1
cgaagaagcaatacaccaaaacccaaataaaacagaaaatttatttatttattcgtttttag

SEQ ID NO: 87021 - DNA, 239 bp, Glycine max
  Clone ID: 700951792H1
gtcccctctaatccccccttttctctccgaggcatatgaggtaatcaacctcgtcgttttggcatgtctccaagttaagctagcatggcttcctcttctttccatctttttctgttaatctctttgccattcttgtaggttctgcttcccttccgagggggtccttcaacgtcatttgagggaccctcgtcctttaatttagctattcttattcttattaattaatttagccaaagaga

SEQ ID NO: 87022 - DNA, 237 bp, Glycine max
  Clone ID: 700951793H1
agaaaactctgtgaagctccttataacaagacagtggactggtccaagtggtatatcttctgggctgacgagcacgttgtggcgaaaaaccatgccgatagcaattataagcttgctaaagatggccttttgtccaaggtgcctattgtccctagtcatgtgcattcgattaacgattccgtgtcagcagaagaagctgccgatgattacgagtttgtcattcgacagctggtgaaa

SEQ ID NO: 87023 - DNA, 242 bp, Glycine max
  Clone ID: 700951794H1
atcaatgtttctaataaatgttttccacgtttcttgttttccttccttttttttattacattttttgaggtttcgccattttgaggagctacatcgacgcctgaaagagttccctgagtataatcttcatttgccaccaaaacattttctgtcaactggtttagatgtaccagtcattcaagagcggtgtgaattactggataaatatttgaagaaactcatgcaactaccaacagtttcgg

SEQ ID NO: 87024 - DNA, 243 bp, Glycine max
  Clone ID: 700951795H1
atcaatggcaattatcatgttgaaaaggacatggtccactggctgcaaaagtcactctcagctaaggcagggatctctcacatgccatctccattaggaagtgattgctcatcaagatcaagtccaaaagtccaagtcacccattgcaggaaaaggttgaatcatttcacaaagtcaaaatcattgagaagtccagtgagtaagatactggaaaatagtgagatcaaatcaaatggcatagca

SEQ ID NO: 87025 - DNA, 245 bp, Glycine max
  Clone ID: 700951796H1
ataaaaaacacacaagcaccacaataacaaaacaaaaatacaattcaaagatcacattctccttcttctcatgttatgttaataaggtttctctttctccttccagaaccaaaatcccatttctggaaaagaaatggaggaatcagattcaacaccaaagtctctgatggagaatctgcttggccttttgagggttcgcgtgaagcgtggtgtcaaccttgccgttcgtgatgttcgaagcagcg

SEQ ID NO: 87026 - DNA, 286 bp, Glycine max
  Clone ID: 700951801H1
attattattagggtttggcgattcagagagaaagagaaatgggagaacgaaaaggaatcccaattgctctggggctcttggcgatgctcctcttcttcattgcttcttcctcttcctctcacctcgttcgtgcttccgatgacgccgacgacgcgatcttctacgagtcattcgacgaggattttgacggacggtggattgtgtccgacaaggaggattacaacggtgtctggaagcatgctaagagtgatgggcatgatgattatggacttcttgttagtgaaca

SEQ ID NO: 87027 - DNA, 292 bp, Glycine max
  Clone ID: 700951802H1
ttcggctcgagcttagaaggcgtcttcataaacgcctttcttctccgtttccgtttcctcgttcgaattcgctttttgatctgcgaaaatgagagagtgcatctcgatccacattggtcaggctggtatccaggtcggaaatgcttgctgggagctctactgcctcgagcacggcatcgggcccgatgggcaaatgccaagtgacaagacagttggcggtggtgatgatgctttcaatactttcttcagcgagactggtgctggaaagcacgtgccacgtgcagtgtttgta

SEQ ID NO: 87028 - DNA, 280 bp, Glycine max
  Clone ID: 700951803H1
caacatgcgactgtgttagcctagcggatgaaaacaaaaaaaaataaaaaaaattacatctaagcacagagaaagaggaagagatggaggcagaggcagaaggtgaagaaggtgcgaactaagcatttacaaggcggcgagaagcataaagcgaagagagaacagtttgtacaacgcactgagatccatctaccaagactccatcttcgtctccgagatctctcttctatggcctcagctccctctcctcgccaacctccgctgcggcctctggtactcc

SEQ ID NO: 87029 - DNA, 276 bp, Glycine max
  Clone ID: 700951805H1
atgaggtccaattcaacactcagtcggttcatttaggcttcactcttcagacttagttgagcctcaccccttttggttggattcaattcatctcagtttggcgagcctaagccattctctcttgactgttttatccttcctagtcaaacaggacaactcacctattatgtgaatttggggcttattgttgttactgataccacataagagggaagaagtgatcctcaacattagcggtgcagttactccgatgccaaacgatgccccaacatgaat

SEQ ID NO: 87030 - DNA, 274 bp, Glycine max
  Clone ID: 700951806H1
gttagaggttcctcgagttgaggttaacttaaactggcttcattcaattagctcttaagacatgtcctgcttcatggaaagcatttgaagctatgctttcccaatctcaagtttgaggttcctcaagttgatgttaactgaagctggtttcattcaatttgctcctatgacctctttctataaaaatgttagaccaatgatcgtaactgtttcatgtgaaacaatcttgtttaaaatagggataataaatgtgtattcaagttgctgtagtagt

SEQ ID NO: 87031 - DNA, 273 bp, Glycine max
  Clone ID: 700951807H1
cccgctcaaaggtctacttctcccccaagctttactatcttagagttcaagtaatcgaggctcaggatctcgttccttccgaaaaaggaaggccccctgactcccttgttagagtgcagctagggaatcagatgagattcacccggccttctcaaattagaggcaccaaccctgtttggaatgacgagcttatgtttgtggccgccgagccatttgaggattttatcattgtcactgttgaggacaaagttggtcctaatgttgaaatcttag

SEQ ID NO: 87032 - DNA, 273 bp, Glycine max
  Clone ID: 700951808H1
ggagaaagttctaataatctcgatgaaagtcaaaaatataagcatttgtggcttgaatgcgaaaattgttatggattaaattataaaaaattttttaaatcaaaaatgaatatttgtgaatactgtggatatcatttgaaaatgggcagttcagatagaatcgaacttttgattgattcgggtacttggaatcctatggatgaagacatggtttctctggatcctattgaatttcattccgaagaggaaccttataaagatcgtattgattct

SEQ ID NO: 87033 - DNA, 271 bp, Glycine max
  Clone ID: 700951811H1
cttctgcccccttttccacttcaattaggtatatcgccgattcgattaccaatttgcttaaactcaatcaagcttcgcagcgtcaatcattctattagaggtgatcataatccatgtaattctcgtacttcatccctagttatattttgtatcaaaaccctaattttacatccttcacgcgcttaatccttgtattttctttgcgcgattggtttttctgtttgcaattcgatgctcagttcatgtttttccaaaaattcttgttgtccct

SEQ ID NO: 87034 - DNA, 275 bp, Glycine max
  Clone ID: 700951812H1
ccgccacctccagctccaccggccgcctctccttcggcaccaccaccacttcctacgtcaagtacacccccttctccaccatctcccgcggctcctccttctacggcctcgacatcaccggcatctccgtgggcggcgccaaactcccagtctcctcctccaccttctccaccggcggtgcaatcatcgactccggcaccgtgatcacccgcctcccccccaccgcctacaccgccctccgctccgccttcaggcaaggcatgtccaaatacccc

SEQ ID NO: 87035 - DNA, 269 bp, Glycine max
  Clone ID: 700951813H1
gtacaatcctgtatgtgattctgtactttcggcagatgcaaaggggataattgaatactggagccctgctacacttcaattcccagagaatgtggtcgattttaaattgaaaagtgacactaacctctttgaaattgcaaaatgcaagacttctgtttcggctattgaggttagtccagatggtaagcaattttccattacatcacctgatcggagaatacgtgtgttttggttcagtacaggtaaactaaggcgagtttatgatgaat

SEQ ID NO: 87036 - DNA, 271 bp, Glycine max
  Clone ID: 700951814H1
cttttctctcttctctctctttctccggcgacgatctcagattccggtcactcctctcgccggcgatcccttattcctccgtcctccgtcgagtcctttccgattcgaatcgttcccagccttgtgccaccatgaatcccgaatacgattatttgttcaagcttttgctgattggagattctggtgtaggcaagtcatgtcttctcctgaggtttgctgatgattcataccttgacagctatatcagtaccattggagtggactttaaaat

SEQ ID NO: 87037 - DNA, 291 bp, Glycine max
  Clone ID: 700951815H1
cgtagtatttcggaattcggtcattcgagcgattcggctcagatttatttcctttattttatatttttaattatttgttcctagtctttatcttataataattttcgcattgcttgcccggtaattcaagatcaacttggaaaatttgcaagatttgggatgaaatctggtcggatcttgctttgtgggatggggattttggtgggtcttatttcaatacaaagctcttcctcttcctcttctaaaaatcccatctctttctcttttttttcatcataacacaaaacacaa

SEQ ID NO: 87038 - DNA, 275 bp, Glycine max
  Clone ID: 700951816H1
ttggaaatggcaactctgcactctcttgcattgtcctctccactctccaactcacttcagaagccacgctcatgtgcagtcccatcttcaattgttcatcaaagtacaaactcttcattcaatggtcaaacattacacctgccgtgtttaaggttacctgtgctaagacaaaatactcccatgcacatgcctgttatcatgatggtcaaaccaaaaatacagttcatccagggaactgatgaacaaacaatacccgatgtgaggctgaccaaatc

SEQ ID NO: 87039 - DNA, 279 bp, Glycine max
  unsure (1)..(279): unsure at all n locations
  Clone ID: 700951817H1
gtcnccggcgactgagtcgcggtctcttcccaactcggaactcagtccattccgcatttctcttcaaaccaaatttcttctgaagaaggagatttgaattcagaattgagtgagaagaagagaatagaaatgggctccgaattgattttcagaggccacgaggctcagcccgtggacgactcgtactcgccgaagccccacaagccctggttcaccgtgactcgcccgattcactacatgctccgcgagcagcgactcgtcttcgtcctcgtcggcgtc

SEQ ID NO: 87040 - DNA, 275 bp, Glycine max
  Clone ID: 700951818H1
ggacataataatgtctataatgctaccatatttccccataatgttgggcttggatgtaccagggatcctaacctggcacaaaggattggtgctgcaactgctcttgaagttagagctacagggattccttatgtatttgctccatgcatagcggtttgtagagatccaagatggggtcggtgttatgaaagctatagtgaggatcctaaaattgtgcaagacatgacagagatcatacctggtctacaaggaagtatccctgccaattccaggaa

SEQ ID NO: 87041 - DNA, 272 bp, Glycine max
  Clone ID: 700951820H1
aaatttcagaagctagtgatcaatcatcaacacagagctgagtgtgttgctctgtgaatccaccttcttcttccattggaggaccatttcctcctggaatagaaatactaccacacttttcttttttcacttctctaagttgctaagttaattgctccttcattttttcactcttcgttctcgcgtacccgtgtcacggtaactcgtggtgaagtgttcgaaaatgactgtcacacctaagatctcagttaacgatgggaaacttgttgtcc

SEQ ID NO: 87042 - DNA, 258 bp, Glycine max
  Clone ID: 700910037H1
ccaatttatccctttatttcccatctagtgtagttttccgggtatgtgggtggaaatgctagtgactagtggttatcttggtgggtgtgctctagaatgtacattggcattggttttttagtacctaatactatggatcacaaatttgaatttgggatgtactctgttctccacccatttctggtccgtcttatgtctctcacgtgccatttcaggtcctttcaaggttaatggagttcctttgagacgtgtgaatca

SEQ ID NO: 87043 - DNA, 260 bp, Glycine max
  Clone ID: 700910040H1
gagacaatgatgaagccatcgatgctcagatctctccactcctgcgccacccgcggcgcctctcatctcttccgccgtgggtacgcctccgagccggtgccggagcgcaaggtagccgttctcggcgccgccggcgtctcgggcagcctctctcactgctcatgaagctcaatcccctcgtttcgagcctctccctttacgatatcgccggaactcccggcgtcgccgccgatatcacccacataaacaccagatctgag

SEQ ID NO: 87044 - DNA, 167 bp, Glycine max
  Clone ID: 700910041H1
gtgttcttcctctttaatttctctatagaatacttacccttttctcaagactaacctctcgatccttctcaaaagaagaaaatttaaatggcaactgaaaagcttagaggttgtgcaaagttttttgcaagctctaaccctacttggccatgatctctttaccaatt

SEQ ID NO: 87045 - DNA, 262 bp, Glycine max
  Clone ID: 700910045H1
gcagttccaggtatagttcatgtgctgaagaagggaagcatggaggctcgggaaaatgcagcagcaacacttttcagcctttcagtaatagatgaaaacaaggttacaattggatctttaggagccataccacctagtgacactgctaagtgagggtaaccaaaggggtaagatagatgctgcaacagcactcttcaatttgtgcatttatcagggcaacaagggaaaggcagtgatggctggcgttattcccacgctgatg

SEQ ID NO: 87046 - DNA, 160 bp, Glycine max
  Clone ID: 700910048H1
gaagtatttgtgccaaagcagaagtcctgtatcaagtggtactctaaataccttaacaatcctccaggcagagtcctcactcttgctgtcaccctcacacttggttggccctttatcttggctttaaatgtttcggaaggccttatgatagatttgcttg

SEQ ID NO: 87047 - DNA, 259 bp, Glycine max
  Clone ID: 700910049H1
tcgcaggatgatctgaagaaggcttacaagaaagccgccatcaagaatcaccctgacaagggcggtgatcccgagaagtttaaagagctggcacaagcatatgaggttctgagtgaccctgagaagcgtgagtatatgatcagtatggtgaagatgcgcttaaggaaggaatgggtggtggcggtggccatgatccgtttgatatcttttcatctttctttggaggtgggagtcctttggatcaggtggcagtagtcga

SEQ ID NO: 87048 - DNA, 260 bp, Glycine max
  Clone ID: 700910050H1
gggaaagcaagtaaacattcccccgatactaatgcataattatcccaaaatcaaattataaataactccattatctctcactccttaaattctcaacgccgctcccacttctctccctctctattgcagcatgtgtcttcctcccaacacattctggtcaccggtggtgccggtttcattggcacccacaccgtcgttcagcttctcaaagctggcttcagcgtttcaataatcgacaatttcgataactccgtcatgga

SEQ ID NO: 87049 - DNA, 263 bp, Glycine max
  Clone ID: 700910052H1
cgccgcctcacctccctctccgtccccctccggcaccggtcgagcaaggcggcggcggcgggtggacatgtggtggaggttgacatggcggagtacgacgtggcgctgaagcacttcgacgacctaatccagccatcctcgtcaagaagaacacaccggactggctccccttcgtgcccgggtcctccttctgggtcccaccgcgcctctctccctccaacgtcgccgacctcgtccacaagctctcctacgaggaccaccgc

SEQ ID NO: 87050 - DNA, 262 bp, Glycine max
  Clone ID: 700910053H1
catttttcaataacaagagagagagagagaggcgtagttcacttcacttcaccactctcgcaactttaattcttcattcttcttctctctctttgacaagtgtcaacaattctcctgtctcgttccgtctcccgatccgtacgattttctttgagggtttgatcgcgccgatgtctgtttaccacgaaatcggaggctcttcatccatcatcggcttccgatcctgcttcaccaaccgcgccaggcttcgctgtcccgctaa

SEQ ID NO: 87051 - DNA, 264 bp, Glycine max
  Clone ID: 700910054H1
ggttggggaagcgaaggagaggatgtggaggctgaagatagcagaaggtggaaatgaggcatacatattcagcacaaacaattttgttgggaggcagacatgggagtttgatcctgaagcagggactccagaggacgagcccaggttgaagcagctcgtaaggatttctaccaccaccgcttcaaggtcaagccctgtgctgacctcctttggcgttttcagattctgagagaaaataacttcagacaaacaatacctagtgtg

SEQ ID NO: 87052 - DNA, 263 bp, Glycine max
  Clone ID: 700910055H1
ccatgccaccgacactctcactctcactctcactagtgttggtggtgctgtttttcgccgccgtggacgcgcattttccggcgaccggcgagcttccaacgttccgcgaggcgccggcattccgcaacggaaggaatgccgcaaccgcccgcgaagcgactccgtgatccacatcgcgatgacgcttgacgcgacctacctccgaggctccgtcgccggagtgttctccgtgctgcagcacgcgtcgtgtccggagaacgtcg

SEQ ID NO: 87053 - DNA, 263 bp, Glycine max
  Clone ID: 700910056H1
agaagagacagagaagtaaacaaaccctagtgaaggaagagatgattcgcagaatcatcgcagtggtgagcagatcatactacacgagcaggtcgaagaaaccgagcctgtactcgaaaatcagccccctcgggatcccaacactagtgtggtaccggtgctcgacgattgggtgttcaaggggaacaagcttcgtgtcgcagaacttcaacgcatcattcgtgaccttcgcaaacgcagtaggttctcccaagccctccaga

SEQ ID NO: 87054 - DNA, 263 bp, Glycine max
  Clone ID: 700910057H1
aaacaatacaaaacaccaccctttaaccgtttgcaacggttgctttgaacgaagggagcagtaacggctatgttataatttctgagtttgtgttgtagagagaagttacgttctgagaggccaagatggattttattcgttcttgacgtccctggggacttcctttgtgatatttctggttttgatgattgtgtttgcgtttctgtcaagtaggccagggaacaatgtggtgtactaccccaacaggatcttgaaggggttgg

SEQ ID NO: 87055 - DNA, 161 bp, Glycine max
  Clone ID: 700910058H1
ttgacacgagtgagtgagtgagaacaagacattgcacttgtcatcatcatcaagctctacatttctttatcatcagtcaacagacacgcatgcattcatttgttcagctgccaccgttctcggtatctcatgtatcttcaaagtttgttgctttcagcctt

SEQ ID NO: 87056 - DNA, 262 bp, Glycine max
  Clone ID: 700910060H1
cagaaaatcatgggaatattgttcatgatcaagaaagggatattgtggcagaagattggaaccagggctgtggcttaaagaattcccctaacttttacaaattcacttctatcattgatagggctacaggatcacaagtttgactgacacagaaccatatgttatgaaactaactgaagatcaaatggcccagctgctttctgccttttggattcaagccaatcttcctgataatttaccttcaaatattgaagctatggct

SEQ ID NO: 87057 - DNA, 262 bp, Glycine max
  Clone ID: 700910062H1
agaaactcttaggcatagcgaaaatgacaaccaccttcgcgaccgtcgcaggactcggtggtgcatcactgtcatccacctcatctcgtctcacctcagggtttgtgaaatcgccagtgagtgctaggaatccctgaggcaagctgtggcaatgggaaatgggagggttacatgcttcgagaggaattggctgcgggcagattacagtgtgattgggtttgggttgattggttggctagcaccctcaagcgtaccggctatc

SEQ ID NO: 87058 - DNA, 261 bp, Glycine max
  Clone ID: 700910063H1
ataaaacggagaaaagaaaaaagaaaaatgtaagtggaagaagagaaagtggcatcgcttaggtacagatacagacacaacctggtaaaaatcccgaccccagtgccgcacaattatccttcactcgcagcggaatttaggagtgtggtcttcctgtcttggaagtgctgcttgaaagaggaccttggtcatatggttgcttgtcatcattatttgtgtggtatttatccatgcattatgtggtcagaacataataatcaa

SEQ ID NO: 87059 - DNA, 258 bp, Glycine max
  Clone ID: 700910065H1
tgattatcttgatgctgctgatacacctggatggtattgtggacctaatttcttttcaactgatgtgctccgtaattttgccaagacccagattgattacatccttggaaataacccaaggaaaatgagtatgttgtaggttttggttctcattacccaaaacatgttcaccatagaggagcatctataccgaagaacaagatcaagtatagctgtaagggtggatggaaatggagggacacttctaagcacaaccca

SEQ ID NO: 87060 - DNA, 256 bp, Glycine max
  Clone ID: 700910067H1
cgggtatgggagctacattggacctcataatcttcacatgggtagacggacgaccaacttccttggccagcaagtcccggcaactgtttggcttcgcttggtagctggactgaatgctcggttgaggactgatggcatggatcaattcgtgcttcactaggtcctgttgttctctggatagatagtcatgcaaacccccaacttgagtttcatggagttaatattgagctatggatagttcccagctacagcttct

SEQ ID NO: 87061 - DNA, 259 bp, Glycine max
  unsure (1)..(259): unsure at all n locations
  Clone ID: 700910069H1
ggccacttcgctctctttctccatttctcgcaaaaccactgccacaacctccccnctccgattcaaagtctccgccatggctaccaccatcgccgccccttctaccaaggtggctcccgccgtcattgtcgcggcggaagagtgggtagggccttgcatgacatgggcaccggtcaagacctcctcgttcgccgacgagagtccgtacctcccagatttgagggtctcattgtagtgtgcacaaggaacgatgatcttg

SEQ ID NO: 87062 - DNA, 260 bp, Glycine max
  Clone ID: 700910071H1
tgctgagaaaattgcgacgcggaaacacgcgcatcttcacgatcctggaatccaccgcggcgtatccagcgattccgatctccgacgagtctgcgcaggcgaagaatcgcgaggccagccgccggtgaagaacgcgcgatttgtctggaaatcgcgattcagccacgattcatccccgatactgagactcaaccacgattcaggaagaaaaacgagacaacctccgattcgtatcggtagcagttggaatcatatcgaat

SEQ ID NO: 87063 - DNA, 263 bp, Glycine max
  Clone ID: 700910074H1
acacactgttaataattattctgattcacgaaaaacaggaaaaccccaaaactctctttgttcacaatgggcacagagacctcatcggtagatatttcggaacccctgctcttggatcctcacgggaacgaggaaaggaagagtatttgcgcgaagaggttccggagtggaaggagcagataacgataagagggttggtggtgagtgctgtgttggggagcttgttctgcatcatcacccacaagctaaatctcaccgttggg

SEQ ID NO: 87064 - DNA, 253 bp, Glycine max
  Clone ID: 700910075H1
tggaatatgcttagaaaactgccaagcccacccatattctctcataacttgcaatcatgaactggataacaataacaacaacaacacggccacccgtatagatccacctctaaagagatcatcattattaccaatttccgatttcacagcgactattctttgtgggcatctcttctcaaatgccaatcttccccatcacggtggctgcatgtcgcaggaccggcaatgcaccggaaacctccatcttttctca

SEQ ID NO: 87065 - DNA, 260 bp, Glycine max
  Clone ID: 700910076H1
cttaaaagttattaagagcttttgcttttctttctgcgcgcctttcccaattaagtagttcttccttttctcaaagcaaaaaaaatgttcatcgagagtttcaaggttgagagtcctaacgtgaagtacacaggactgagattcagtccgtgtacaactatgaaaccactgaacttgttcacgagaacaataatggcacttatcagtgggttgtcaagcccaaaactgtcaaatatgaatttaaaaccaacacccatgtc

SEQ ID NO: 87066 - DNA, 261 bp, Glycine max
  Clone ID: 700910077H1
gagcaggctcggtcttcaagtcccacacgcaccaccgcaagggccctgcccgcttccggagcctggatttcggagagcgcaacggctacctgaagggtgtcgtcactgacgtcatccacgatcctggccgtgcgcgcctctcgctaaggtcgccttccgccacccgttccgctacaagaagcagaacgagctcttcatcgccgccgagggtctctacaccggccagttcatctactgcggcaagaaggccaccctcgttgt

SEQ ID NO: 87067 - DNA, 257 bp, Glycine max
  Clone ID: 700910078H1
gatttggaacaaacaacaatagaggggttgtggtgctctgtgtgctgcaatttccttttgagcttgtgtttgattcatcaaatcatcaaagatgactgtaggggcaggaatatctgttgcagatgggaacttatggtgttggggaacaaagtgctgagccatgtccatgacaaggttcttgttacccctgcatgtggtggtgctttgctcaatggggcattcattggggttcaatcccatcacaagggtagccgcac

SEQ ID NO: 87068 - DNA, 258 bp, Glycine max
  Clone ID: 700910079H1
aatttaagtgaggagctagagaatgatgatgaagtctgctatgtgtgcagtggtggttgtagcacttcttcttctggcggaggtggggcccatggctgaggctgtgacatgcaccccaacagagttgagtcctgtcttccagcaatcacttccggtgctaaaccttccaatgcttgttgcacgaagctgaagcagcaaaaaccatgcttatgtggctacctcaaaaacgctagcttgaagcagtatgttaactctcct

SEQ ID NO: 87069 - DNA, 260 bp, Glycine max
  Clone ID: 700910080H1
agaatatttgtggcaaagcagaagtcctgtatcaagtggtatcataataccttaacaatcctccaggcagagtcctcaatcttgctgtcaccctcacacttggttggcccttgctcttggctttaaatgtttcggaaggccttatgatagatttgcttgcgactatgacccatatggtcccatttactctgatcgtgaacgacttcaaatatatatatcagatgcaggagtacttgcagtatgctatggcctgttccgtc

SEQ ID NO: 87070 - DNA, 255 bp, Glycine max
  Clone ID: 700910081H1
gggacacgaaccaaaggtggttattctaacatcatggttgtgcaccagcgttatgtgctccgatttcctgagaacttgcctcttgatgctggtgctcctctgctgtgtgctgggataactgtgtatagccgatgaaatattatgggatgacagagccaggcaaacatttgggagtggcagggcttggtgggttaggtcatgttgcaatcaaacttgctaaggcgtttgggctgaaagttactgtcatcagtagct

SEQ ID NO: 87071 - DNA, 152 bp, Glycine max
  Clone ID: 700910082H1
aatttctccaactcaaaactaagtttcgtctttgtgatctcttgattatattatatcgatttgtgaattgtttttccacaaaaaaaaaattctatcataccatggcttcattatgccggcggttatcccgccgctccggccggtaacttccg

SEQ ID NO: 87072 - DNA, 154 bp, Glycine max
  unsure (1)..(154): unsure at all n locations
  Clone ID: 700910083H1
ctctgtacaattcttcgttcgttctctgcagttatatcctgtgtgagcttcaatggcggacgctgaaaccttcgctttccaggctgagatcaaccagcttctaagtctcatcatcaacacattctacagtcaaggagataancttgcgtgaact

SEQ ID NO: 87073 - DNA, 259 bp, Glycine max
  Clone ID: 700910085H1
gtttgtgggaacattatggagcccagattcgtaatctccgcatcggaggccgaatcccaatcaatctccaaactcctcccttccctcgtttcctcttctcagtccctcgcccgtccttccatctccaacttcccgtcgccgccgtcggactcgccgcctccggccgcatcttcgtgggcgtgaacgtggagttccccggcctccccttccaccacaccatccacgtcgaacagttcctcctcaccaacatggccaacaa

SEQ ID NO: 87074 - DNA, 259 bp, Glycine max
  Clone ID: 700910086H1
gtacttttacaatggagatatggaatagttggtgggttttgcaaattatgcaatttctgggtttttttagtttttggatttcatttgcaaagtttaggactttattctcaagagcttttggttatggccaaggttgtgaagggtgactgcagtacttggatctttgtttccttcaatgggttggtcacagttggttctttcatattcttcctcttggtcctttcctgggcttatttatacgcatttcccagttctcaat

SEQ ID NO: 87075 - DNA, 163 bp, Glycine max
  Clone ID: 700910089H1
ggtttttctcaagtaaatgagactcacctttgcgttttggggggtctattattaggtttgtatgtgggttttctcatgtgaatgagagttacccacatctcatggtgaagttctcatgatttgtggaccttatctttttgtagtgaatatataatattttttc

SEQ ID NO: 87076 - DNA, 263 bp, Glycine max
  Clone ID: 700910090H1
gggcaaccggggaccggttgaaggaaactcaggctatcaacaaaagtctctcctctttgagtgatgtcatattgcgttggcaaagaaacaggagcatgtaccctttaggaattcaaaattgacataccttctcagccatgtcttggtggggattccaaaactttgatgtttgtgaacatctcacctgatccatcttcaactggagagtcactttgctctcttcggtttgctgctggagtgaatgcctgcgagattggtatccc

SEQ ID NO: 87077 - DNA, 245 bp, Glycine max
  Clone ID: 700910091H1
tgacgctgcaataataggcaaaggtggaattgaaggatgggcatggcagcaggcacagcataggcagtgacacaacacaacacagccgcccttggaattaaccatgaaaggcgtgttttcggcgcccggtgatacgtccacttcaagtcccaagtccctcttcacaaaattcctataggcactaagcagtggcggtattacgatttcggtccaaaagccgtgcctccgcttatatgtcttcctgg

SEQ ID NO: 87078 - DNA, 262 bp, Glycine max
  Clone ID: 700910092H1
agatcgtgagaggggcagtagccgagattccgtgagttgcaaaaatgaagacgattctttccaccgagaccatgaacatcccggacggcgtgagcatcaaagttcatgccaaggtcatcgaagttgagggcccgcggaaaattggtgcgagacttcaagcatttgaatctcgattttcagctcattactgacgaaaacggtaaaagaaagctgaaaatcgacgcgtggtttggttctcggaaaacatccgccgccattcgca

SEQ ID NO: 87079 - DNA, 158 bp, Glycine max
  Clone ID: 700910093H1
catccatgctgaaggtggtctaaatcagcagagaattgcgatatgcaatgcagtggctgtggcaagaatattgaatgccaaccttagtgagcctggtttgaagcaggaccagatttggtaagaccagacgatttgaagacagttttgatgtggatcac

SEQ ID NO: 87080 - DNA, 255 bp, Glycine max
  Clone ID: 700910095H1
ggtggatgctatcttggatgtcgatgtcagttgcatgttcatagttaggaaaaacggcaaaacttcactgcacaatgctgctaggtatggtgtccttcgtattgtaaaaacatatattgctcgggatccaggatagtatgcatcaaagatagaaaaggtcaaactgcccttcatatggctgtcaaaggacagtgtacttcagtggtggaggagatattactagctgatccttctatattgaatgagcgagataag

SEQ ID NO: 87081 - DNA, 260 bp, Glycine max
  unsure (1)..(260): unsure at all n locations
  Clone ID: 700910096H1
ggtggctacttttgtggtggcagccacagctggtagcttttaccaagactttgaaataacatggggtggtgagcgtgccaaaatctatgaaaatggaaatcttctcaccctctccctagacagagcctctggctggctttcgttccaaaaaagaatacttgttcggaaaaattgacatgcatntcaaagctcgtgcctggtaactctgctggaacagtcactgcctattatttatcttctctggggcctactcatgacga

SEQ ID NO: 87082 - DNA, 220 bp, Glycine max
  Clone ID: 700909673H1
agagtctcttttcttttccccctcaacactcacttgccgttggccacgtgttgcacacctccaagaccaaaacgacgcgtttttgaaaccgctctttgactctatcccacggttccacataacatcgcagacgcgttccgtcgaatcgcgaattcgaaggatatcgatattatcgtgctacacgagattttgaaaagacatgaaaatgtctatggttgat

SEQ ID NO: 87083 - DNA, 236 bp, Glycine max
  Clone ID: 700909674H1
atttgacaaaaaagtagccactgccccaacgatcccatttcccttgacttctctacgtgaagctccttgttttgcataggagctagttgaaatgtccgagggaaatgcagggaaaggaaagaaaatcgccatcattggtgtctcaaccttattgttggtggctatggttgtggcggtcacaattggggtcaatctcaatgagaatggttccaacaatgatatagatgacaacaaga

SEQ ID NO: 87084 - DNA, 236 bp, Glycine max
  Clone ID: 700909675H1
tcttcactgttctctctctgagcaaagccgaggatccctcatagtattggcaggtcaaatattggctaatgtcggatggggcattcatcgatgtacaagcgcactccttcgagagataattcaaacatggaggacgtggaagaaaactcagatcttgtagacatcggcctggacaagggaaccacaaatccttcattgatcgcttctttaccgcatgtacttatggcgaccattct

SEQ ID NO: 87085 - DNA, 237 bp, Glycine max
  Clone ID: 700909676H1
attctctgcacttttcagttacaaagcatttcattgttttacaatatacaacactacaatggctgcttcaacaatggctctctcttcatcatcattggctggccaagctatcaagcttgccccctccacccctcagcttggtgttggaagggttagcatgagaaaaacagcctccaagactgtttcctcaggaagcccatggtacggcccagatcgtgtcaagtacgtgggcccatt

SEQ ID NO: 87086 - DNA, 77 bp, Glycine max
  Clone ID: 700909679H1
gagattccaaggtctggagtcatcattagcaaaccagatggagatgatatttataaaggagttccaaaggattacac

SEQ ID NO: 87087 - DNA, 252 bp, Glycine max
  Clone ID: 700909681H1
ctactttcccttcccaacaacaacaagatgatgccttctgcagaagcttcctccgaaaccatttgtgtcaccggcgctggtggcttcatcgcctcttggatggtcaaactcctcttggaaaaaggctacactgtccgaggaacccgcagaaatccagatgatcccaagaacgggcacttgaaggagtttgaaggagcctccgagaggttaactctgcataaggttgacctccttcatcttgactccgttaga

SEQ ID NO: 87088 - DNA, 252 bp, Glycine max
  Clone ID: 700909682H1
ttcaatatgataattataaagtgcaaaaagctccacacaataacaaggactttgtggacatattgctatcacttatgaatcaacccatcgatcttcagggccatcaaaatgtcattgatagaactaacatcaaggctattatattagatatgattatggcggcatttgacacgtcatccacaacggttgagtgggccatgtcagatactcttgaggcatcaaagtgtgatgaagagacttcaagatgagcta

SEQ ID NO: 87089 - DNA, 242 bp, Glycine max
  Clone ID: 700909683H1
ctcgcacctcgactcgctcgtgggacaggcactgttcggagatggcgccgcagcgttgatcatcggatcagaccccgacccagcagtggagcggccgatattcgagatgatatcggccgcccagacaatcctgcccgactctgacggtgctatagatgggcacctcgggaggtgggactcacgttccacctcttgaaagatgtgcccgggatcatctcgaagaacattgagaagatcttgtt

SEQ ID NO: 87090 - DNA, 244 bp, Glycine max
  Clone ID: 700909684H1
gttccatccgcatccgctagctcgcgcaggcaccagcaggtgaggttattgtgatttgaatggagggaagtggaggtggcggtgcttcaccgtctgcaccgttgaagcaatacttacaggaattctcgaagctgtttcagtactatctggataaatccactccccatccccccgacaggtggattgggactttcgtcattgcatccatctacgttttgcgtgttgtttatgtgcaggggtttac

SEQ ID NO: 87091 - DNA, 241 bp, Glycine max
  Clone ID: 700909686H1
tgtcactgacctatcttggtagagatttgaagtttaaaccttcaaattaatcaaaccattttaatttgcctatagattctgagtcactgctgctatggcgctacgcgtacttcttgtgttggggacgttgctgatgttgtgccttgttaaggtttcatctgatccaaagatagaagaagaaatactggaagcagaagaagaactgcaggttcccgataacgagccacgtatcgtgagagac

SEQ ID NO: 87092 - DNA, 127 bp, Glycine max
  Clone ID: 700909687H1
cttaattaaccaaactgctcgtctcgttccgcgtcgtcgtttcctccaatcatctcaacggcacagtgatggtagcgctatcgctgttgggggaaaaaatccgaatccaaaggtggtaatagatgac

SEQ ID NO: 87093 - DNA, 230 bp, Glycine max
  Clone ID: 700909690H1
gtgtgaagaaagagacctgaaagtgctgttgagccggtgtgttcatcagacaaaaaaaaacccagcaacaatgggaggcacttctgcagatcttcaccaccatgaatcagatatagaactcactgatgctgaaaggactgacacgaagttaggggcttctgattcaaaagctggcaatgatgttggacttgacagtggcaccaaatcccaggctgaagctgaaggacaac

SEQ ID NO: 87094 - DNA, 235 bp, Glycine max
  Clone ID: 700909691H1
gtcttctcgactctggtgtgtcaccctttaatggcttcacctatgatcatctctatggaacaaaggttggtggaaccattttcgacagatttagacgccgccacacggctgctgaactgcttgcttcagggaaccaggacaaacttactgttttggtctatgccactgtccaaaagattgtgtttgatacaagaggaaagaaaccaaaagccgtgggggttattttccaagatga

SEQ ID NO: 87095 - DNA, 233 bp, Glycine max
  Clone ID: 700909692H1
gttgttgagccttacaacagtgtcctctccactcattctcttcttgagcacactgatgtggctgtcctgctcgacaatgaagccatttatgacatctgcaggcgttcactggacattgagaggccaacctacaccaaccttaatcgtttagtttctcaggtgatatcatcactgactgcttccctgaggtttgatggagccttgaatgttgatgtcaatgaattccagaccaa

SEQ ID NO: 87096 - DNA, 233 bp, Glycine max
  Clone ID: 700909694H1
ctaacatttccctttacttgctaaaacatggtccaagaaaagagactagttgacgaggtgtccggttggctcaaaatttatgacgacggttcagtggaccggacatggtccggaccggaccaattcaagttcatggccgaaccggcccctccccatgaacaattcatagacggcgttgccattcgcgacgtcgccgttactcacggtggtggccagagtggccaccatgtccg

SEQ ID NO: 87097 - DNA, 230 bp, Glycine max
  Clone ID: 700909695H1
tattattctgagtgtggtgcaagccacctatgtactatttttcctttacttatgcaaaagctacctttgtactatttttcctttacttctgcacaagctaccttcgttttgcaggtacatgggtacaataactggcataagtgacctggatcctgttcgttggccgaattctcattggcgatctgttaaggttggttgggacgaatcaaccgctggagagagacagcccg

SEQ ID NO: 87098 - DNA, 262 bp, Glycine max
  Clone ID: 700909701H1
cgaaggatctctctctctcatcacatgatcattcagcgagcaatagcatagtgtgaaatttgagtgagcgagcgaggaatcggaagaaaacgaaaccctaagaagaagatgccgaagaagatgggggtgaacacgaaggcggatgcggcaagggcacgtaagagcgcggtggatacggagcgcaaggagaaggagactcgagagaaggaggaccagtactggcgagaggcggagggttcaaagtcacgcgccgcgaagaaga

SEQ ID NO: 87099 - DNA, 261 bp, Glycine max
  Clone ID: 700909702H1
atgatcattctgactctctttctctttcccctcttcttcgtcgtctccgttttcttttatccgtttctgtttttccaattttgccctccgctttttccctatttcccaattttgccctcttcttcttctaccatgacctacttgaagtcgtagctcgagtccgtgttcgccttttccaattcccaatttcaatttcccaaacttcgtaggatttccgtcgaataatggaacctcgagttgggaacaagttccgtctcggtc

SEQ ID NO: 87100 - DNA, 261 bp, Glycine max
  Clone ID: 700909705H1
caccaaagcagtgtagttttccgttgtcactgccatggctttcaaaaaagtactattccaatatttcactctggatttgtgtcttgtcttcgcattttgtgcttttgagggcaatgctcgcactctcgaagatgctccaacgcgtgagaggcatgagcagtggatggctatacatggaaaagtctacacgcactcttatgagaaagagcagaaataccagacattcaaagaaaacgtgcaagtatagaagcctttaaccat

SEQ ID NO: 87101 - DNA, 260 bp, Glycine max
  Clone ID: 700909707H1
ggagactggatggtggaacgaatgaacctttattcacaaatgtcactagagattttattggcactctagattacatattttacacagcggattcattggttgtggagtcattattggagttgctggatgaggagagtttgaggaaggacacagcacttccttcacctgaatggtcctcagatcacattgctctcttagctgagtttcgctgctgcaagaataaatctaggcgttgacagttaaggtcactttcagtgata

SEQ ID NO: 87102 - DNA, 252 bp, Glycine max
  Clone ID: 700909708H1
ggttgcaggagctgctgctgctggtggtctttctcttgctgatgttgctgctgaagcaaaacatgcatctgaaatagtgggaacaatgggtgttgctttgactgtgtgctcaattcctggtcaagttgcatcagatcgtttggggccaggaaagatggaacttggtcttggaattcatggagaacctggggcagctgtggctgatattcagcccgtaaatgtggtggtttctcatgttctacagcaaatatt

SEQ ID NO: 87103 - DNA, 158 bp, Glycine max
  Clone ID: 700909709H1
gtgctggatctgctgcttctttgtctactcttctaaatcgactggatcctgtgctccgaaagacagctcatcttggaagctggcaggttattagcccagtggaaactgttggatatgttgaggtcatagatgagttgcttgctgttccacacaacata

SEQ ID NO: 87104 - DNA, 258 bp, Glycine max
  Clone ID: 700909710H1
atcttgggcacccacacttctgagaatgagcccaattacctcatgctggcccaggtccaactccctcttgatgatgctgagaatgatgcccgccactatgacgatgatcgccccgacatcggtggctttggctgcgccaatggcaaggtccagatcatccagcagatcaaccatgagggtgaggttaacagggctcgctacatgccccagaaccctttcatcattgccaccaagaccgttagtgctgaggtttatgta

SEQ ID NO: 87105 - DNA, 253 bp, Glycine max
  Clone ID: 700909712H1
ccatagtgacgaacctcatgttcttgactacagtaaatatcctggtctggaggagcgtcaaaggtttgtttataattatttgagttctgaaggttagtccactaaaatcttactcccacataccactgaaaatacatattattggcagagatctggatttaggtaactgctattgatctattctcagctgaaagaataaacttgctctacaatttggttgatttgtgatatcactccagcttatatttttagt

SEQ ID NO: 87106 - DNA, 257 bp, Glycine max
  Clone ID: 700909713H1
gaactagtagctttcttttaaaattaaaattagaatcattatcgtttatcacactccaacaacgcctttcgctcttaccaccctcgcgggtcattttcttgggaaaactcgtttccaccaagaaaatcgatttccctggaaacaaacactcgcgaatctccgatgcgactcgtttcactttaattcgatgatgatcgccactatatgccgccctgtgcgttccccgtgggaggaaccaatggatcgctgcttccgat

SEQ ID NO: 87107 - DNA, 247 bp, Glycine max
  Clone ID: 700909714H1
tgcagatcgaacgcacccaaagaaaccctgctactgccaccgcgctagctagggtttcattccacccactcccaacaatctcccaatagaatgctgaaagagaattgctgattatcgcttcactcaactctaccaaatcgcatcactgaccaatctggtggagccgattccacagtagatgacattagaccgtgcttgcggacaaagcctcttcttcttctgctctctctgctacttccacacaaca

SEQ ID NO: 87108 - DNA, 254 bp, Glycine max
  Clone ID: 700909716H1
cgaagagagagcaaaatcattcgcttccttcttgtatgataatgcaaaatctctggctgctgccaatggctattcacttttccaaggacttgctgggacagcatgcctctggtttgatctgcttgcacccgacaactctaggttcccaggttatgaattatagatggttaaagtagagatggtacttattctacaagcagaaggaacgtggcatggatggaaaatgttaggtagaacaccaatcataagtgata

SEQ ID NO: 87109 - DNA, 259 bp, Glycine max
  Clone ID: 700909721H1
ctctctcctcctttttgttcacctgccacatttacaacaaccccctcttcttctttatcaacttttcctcagaactctcttagttttagctgctcccaatcgtttggaccaaaagccattaaccccttttgcagaaaagcacgattttgctctctacaagggtcaacgagtgtgaaaagcagaaaaagcttggtgctttgtaccatcaacatgactatagcaacggatagtttgttgcaggtggtggaggaggaagagg

SEQ ID NO: 87110 - DNA, 255 bp, Glycine max
  Clone ID: 700909722H1
tttctctattttgtagtatttggcacatagtgcatagtttgtgccattaattaaccaaggaaaaacgccaccttttggctccttctgttgttccaactgtgcatttgtgtgctgtttcttccacacacacgcagcctaccagccacaatgagaacggggaacctcttctggcttggcattgttgcagcacttgttttcagcttctgggttgatgccttttcagccaaccattattacccccaccaccacttcaat

SEQ ID NO: 87111 - DNA, 257 bp, Glycine max
  Clone ID: 700909724H1
ctcccagtagagatgtgccaagcagggatatgggaggaccacctggtgggaacccatattctgggtgagatcactgcagatttttctagccaatgtagataacgaagaattgtgcccaagaaagcagagtttatgctatgtttctcaaggaattagaatttattagtcttacgtgttactcctattttctaatgaacctgcatgttgtgcatccgaagttcaatttttttaatgctagatacgatcattttgtttct

SEQ ID NO: 87112 - DNA, 254 bp, Glycine max
  Clone ID: 700909726H1
ttctttctttatcttctcatttttctcaatacaatttttttctttctttctcaagttttgctacttttctcttcttaaccatagttcacatattatatcatcacatatcatagtgatatcatatcacaatgtgtggcatacttgctgtgcttggttgctctgattcatctcaagccaaaagggtccgcgtccttgagctttctcgcagattgaagcaccgtggtcctgactggagtgggctccaccaatatggt

SEQ ID NO: 87113 - DNA, 253 bp, Glycine max
  Clone ID: 700909729H1
agatggcaaaatttacgtggttaacgactcttccgacaatgacctcgtaaaccctaaaccagggacattgagacatgctgcaattcaaagagagccactgtggatcatttttgatcgaaacatgaacattaaacttcacgcggagctcatgctaacggataataagaccatagatgcacgtggtgccaatgtgcacattagtgagggtgcccaaataacgttgcaatatgtgaaaaacatcatcattcacggt

SEQ ID NO: 87114 - DNA, 252 bp, Glycine max
  Clone ID: 700909730H1
gaatgagagcatcaaactcttcttcttcgatttccattgcgaacgttactttttcttcttctttctcttcattttcttcgctcttcgatcttcgtccggggactgctccgaataccaccaccaccactcgccgatggccacgatcggaggcttacacgactcccaaggctctcaaaacagcgtcgaaaccgaagccctcgctcgattcgccgtagacgaacacaacaagaagcagaattcgcttctggagtt

SEQ ID NO: 87115 - DNA, 251 bp, Glycine max
  Clone ID: 700909732H1
cacccccatttgcaacgagtcaccaaaatcgaattctgcaatcgacccatttcaattcatctatccaaatcgcataacccacccttcaatttccgcttctgattgcttcctcccccatttcaaagttagggttcggtctctggtggcgcaacaatgccggagatcgaccaggcggcggcggcggcggaggaaaccgccctgttcggaaaatacgagctgggccgcgtcctcggctgcggtgccttcgccaa

SEQ ID NO: 87116 - DNA, 98 bp, Glycine max
  Clone ID: 700909733H1
atgtgctctcatgttcctgttgtggtgaaggatttgtagtttgtaaattggatcatctcttctatgtttgcaacttggtgtgataaaaaacaagaagt

SEQ ID NO: 87117 - DNA, 255 bp, Glycine max
  Clone ID: 700909735H1
ggatcattccaatatgggcaacagaattgttatgggaaattcccttctctttatctctttcttcatcttcagctttagtttcttggaggctcaaaaggctccagcagtttatgtgtttggagactcacttgttgatgttggcaacaacaattacttgagtctctccattgaaaaggcaattcttcctcactatggcattgattttccaactaagaaacccactgggagatttagcaatggcaagaatgctgcaga

SEQ ID NO: 87118 - DNA, 257 bp, Glycine max
  Clone ID: 700909736H1
gccgtaccggagttcggcttgtcgtcgccggagcccagggcaccggaaaatctagcctcatcatcacggccgccgccgaaaactttccggtgaatgtaccaccggtgttgcctcccacgcggttgcctgaacatctgtatccggatcgcgtgcctatcaccatcatcgacacctcttcccgtgctgaggatagtgataaagttgctgaagaattgcagagggctgacacagttgttcttacctatgcatgtgatcgg

SEQ ID NO: 87119 - DNA, 253 bp, Glycine max
  Clone ID: 700909739H1
gaataaatctttcctctgctttctttttcttgtgtctccctacacagttggaagtagaaggcagtgatctgacatggatgcggagaatggcgaagagagaaaacatcatgaggcaagcacgtcagagaatagtgcagaaacaagcacgaatggggagaagagagaaaagggcaaacaaaaggaaaagccagagacagttccatttcacaagctgtcagcttttgcagactccactgacattcttttgatggct

SEQ ID NO: 87120 - DNA, 252 bp, Glycine max
  Clone ID: 700909740H1
gaatcttctcctcctgaaggagtttgttccaacacggtggaaaaccacctggtccagaccaatttgtctgatgggtcacccaacaagtctgtgccagcatctggacttgatgcagtgattcctagtgcaaatcagcttaccatcttctataatgggagtgtttgtgtctatgatggaatccctgcagagaaggtgcatgaaataatgcttattgctgctgctgctgccaagtccactgaaatgaagaagatt

SEQ ID NO: 87121 - DNA, 249 bp, Glycine max
  Clone ID: 700909741H1
aaaagctatagctttgcaaaatattgggcaaataaccagagaaaatgatggaagctacatacccatggtaggggaaataaggggtaatttgggaaaggactataagaaataaaaggaataaaataaatctaagcctttaatttagaagtaaaataaaatctggcagtccaaatacactttcccattatgggatatatacctttcccatgctagccgtcgctatgttcccattgttctattccacacaac

SEQ ID NO: 87122 - DNA, 250 bp, Glycine max
  Clone ID: 700909742H1
gtgaaagagaatccgaggcgaagagaagagaaaaattaagatggaggggaaggagcaggatgtgtcgctgggagcgaacaagttcccggagagacagccgattgggacggcggcgcagagccaagacgacggcaaggactaccaggagccggcgccggcgccactggttgacccgacggagtttacgtcatggtccttttacagagcagggatagcagagtttgtggccacttttctgtttctatacatc

SEQ ID NO: 87123 - DNA, 252 bp, Glycine max
  Clone ID: 700909743H1
agagagtggtttcagtgagtgatcggtgttcacttgatccttcataagtcgtcatcatcatcatcatcatcaccgttgattgaagaagatgccgatcagaaacatcgccatcggaaggcctgaagaggctactcaccccgacacgttgaaggcggggttggctgagttcatctccacacttgatcttcgtgttcgccggttcaggttccggcatcgcctacaacaagctcaccgacaacggcgccgccactc

SEQ ID NO: 87124 - DNA, 250 bp, Glycine max
  Clone ID: 700909745H1
ccgagcttactggagtatgcatgagacttgaagatgaaagtgatgcaaaaagcttggagattaaacagatgacagaaagagtctgtctactggaaagtgaaattggaggactgaaagggcagttatctgcatataatctagtcattagttcattgaaagaggattttgcttctttagaacacactgccctagttcggataaacaaaatgcctgttgaatgcaatcaagaacaaaaggatgcagtaattga

SEQ ID NO: 87125 - DNA, 250 bp, Glycine max
  Clone ID: 700909746H1
gagcgagaagtttgtttcgggcttgatccagtggggcgcatatcagccaatgatagtgtttttccgaccaaaaagaaacccctgacgaaattactcctcttcgaaaatactacgaaaatcgaaaatcaatcgtagaccacttctcaaacacaagagacaccaccgatgatgatgatgatgatattaaagcaacatcaccaggagtaagagagagcaaaggtggctccttttcatgtgagttttgagtgat

SEQ ID NO: 87126 - DNA, 248 bp, Glycine max
  Clone ID: 700909748H1
ctgcaaatagctctgatgcgtgctccaatggtgccttcgtaccttcagagacgaacaaccataatagtggtggaaattctaaaacatcttttatggacaatgatcaagatactgtagcaccttctgtgagcacaggcttcctggagctctccaggcaacatgatttttgtattgatactgcagttggcattaattcaaatggggatgttcatggcttatgttcagggttatcatctattagcattaat

SEQ ID NO: 87127 - DNA, 247 bp, Glycine max
  Clone ID: 700909750H1
caagatctggtcttcttatgatgcgtgcgtgtttgtttctactttaaatgtttgaaattcatgtaagcctagatagacgcatctctgtaatcgatatatttttttttccctttcattttactgtgtggtgtaaattggttgttaattctgttaagggatgagagcttttgttttttttctggtaaaattgacgaatccggtgtatttctctgacttttatttgatagcttgagacttaaagtactcg

SEQ ID NO: 87128 - DNA, 253 bp, Glycine max
  Clone ID: 700909753H1
ctcgagccgtttcccaatttcgcgataccaaaacctcagcaatcaacaatgtcgttttacccaaggggccgtcgcgacgacgacacggtggacgactacgacgagtacgaccccaccccttacggcggcggctacgacatcgccctcacctacggccgccccatcccaccctccgatgagacctgctaccctctaggagcctcttcttctgatgacaacttcgattatgatcgccctcaatacacctctaacg

SEQ ID NO: 87129 - DNA, 250 bp, Glycine max
  Clone ID: 700909755H1
aatcgatcgaggcagatcagaattgagggcttagaaatcaggattcagaatgggtcagactgaaagcgcagaagctgtgacggaaactcaaaccacaaccaacgacacttccaatcccatttccctggaatccgtcctcgcagaagctgcagaatatggaagccaacacactgagtctgtggaggaaatggctcagaaagcccttgaatgcccttgcattgctgacttgcgaaccggttcctgtggctct

SEQ ID NO: 87130 - DNA, 248 bp, Glycine max
  Clone ID: 700909757H1
gtgcagtaactccaaatgcttatctgcaattggatcttgagttggtctcgtggaagaccgtgtctgacattaccaaggatagaaaggttctcaagaagactttgaaggaaggggagggatatgaacgaccaaatgatggagctgtagttcaagtgaaactgattggcaagttgcaagatggaactgttttcgttaagaagggctacgttgatgaacagccatttgagttcaaaattgatgaagagcaa

SEQ ID NO: 87131 - DNA, 247 bp, Glycine max
  Clone ID: 700909758H1
cacaatttcacatttcattcatattcattacttcatggtccttcaacaagctccttaatttcattctctccttccaccttttcctcacgcatcaccgttacttttgtttctgtcttagtgtgccgtgtcccaatacatacataatagaacaacaaacacacacacataactctctctctctgctgaggtaattactgaaatccgtgcctgcttccacccttttgccgaagtttgcaaatttttctct

SEQ ID NO: 87132 - DNA, 246 bp, Glycine max
  Clone ID: 700909761H1
ctgcaacttttcaccgtagaatcctctgcaaagccttcagagattctggcgaggacatcaaggcggtgctcaagtccgacgacggtggtggcagcggcgacggcggcggcgacggtgggggtgggggtgaccgggatgcggagaagaaagaagggcccttgccggaatggttgaatttcagttctgatgacgcaaaaacggtgcttgtggctctggcaatttcgcttgcgtttcgaacgttcgtgg

SEQ ID NO: 87133 - DNA, 245 bp, Glycine max
  Clone ID: 700909763H1
agaaactcttaggcatagcgaaaatgacaaccaccttcgcgaccgtcgcaggactcggtggtgcatcactgtcatccacctcatctcgtctcacctcagggtttgtgaaatcgccagtgagtgctaggaatcccttgaggcaagctgtggcaatgggaaatgggagggttacatgcttcgagaggaattggctgcgggcagattacagtgtgattgggtttgggttgattggttggctagcaccc

SEQ ID NO: 87134 - DNA, 253 bp, Glycine max
  Clone ID: 700909765H1
atctcattcacacattcacagttcttatctctctctctttgtcgcttggatcactgatctcatcacaactttcagaaatgtcgacatctgataagccagaagtggtggaaaggggtagcaaggatgaaaaacacaaggaagatgatcaagaggaggggaagggtggattcattgagaaggtgaaggatttcattcatgacattggtgagaagattgaggaagctattgggtttgggaagccaactgctgacgt

SEQ ID NO: 87135 - DNA, 247 bp, Glycine max
  Clone ID: 700909766H1
ctttgacagggagtgggtctgggagtaggaatagtagtggaattggggactctcacatcattgaagctggaaatctaaggatatcagttcaggttctgaggaaagtgaccgagaactttgcgcctgagaatgagcttggccgtggtggatttggggttgtttataagggggagttggatgatggtactaaaattgcagtgaaacgaatggaagcaggtgtgattagtagtaaggccttggatgaatt

SEQ ID NO: 87136 - DNA, 251 bp, Glycine max
  Clone ID: 700909767H1
gctcttcctccctttctcacagcaatggccgccgcagcacgccctctcgtcaccgtgcaggccctcgacggtgacatggcaaccgatgcctccgccaccgttcccatccctgacgtcatgaaggcctctatccgccccgacatcgtcaatttcgtacactcgaacatctccaagaacagccgccagccatacgccgtcagtcgtcgcgctggtcaccagacctccgccgaatcctggggtaccggccgagc

SEQ ID NO: 87137 - DNA, 246 bp, Glycine max
  Clone ID: 700909770H1
aggccatagtgaagtcggagaaattagcataagattttcacaagaaatagactcatcaaatgtgcaggaaagctcatctatgagctctgcactggacgaagcctcacttgaagcaactagctttcgccaactgcaacaggtcatggatcagttggatattagaactaaactatgcataagggacagtctataccgcttggctaaaagtgctgagcaaagacataatgataccaatgcaagtggtca

SEQ ID NO: 87138 - DNA, 246 bp, Glycine max
  Clone ID: 700909771H1
cttcaacactaaattagagacgacccactttccttgcagatctttttccagggaaaagtttggattttttgatcgttttgtgataagagttagatgttgagtgatagacggaaaagttgaggtggggttggattatatggatagtctttgttgcttcagctctttcagtcaggtggttggagggcgttcttcatgtaactctggcaaaggcaagagcagtcagtcctcagtcaagtatggctatag

SEQ ID NO: 87139 - DNA, 243 bp, Glycine max
  Clone ID: 700909773H1
atttcttttcccctttttctctttgctgactaactcaatcaatttagtgtggcttccgggaacaattcaggaatcatggctagggttttagctcagtctactggtatgcctggcctactgagtgggcgaaggcatgggccgcataaaggatcaggagaaacgaaaagatctgttaaaatgatgagtaccttacgaattcctgctttaagaatgtctagtttctctggattacggacacttaat

SEQ ID NO: 87140 - DNA, 244 bp, Glycine max
  Clone ID: 700909774H1
taaccttttctctccggttaccagaaccgtaagttgctgaacatgaacccgcaatcgccggttcgggcggaaccggagcctccggttccgacgttctccccacggttcgcgctcacgtccggttcgcagcggaaaatcgcgatcgcggtcgatctgagcgacgaaagcgcctacgcggtgcgctgggcggtgcagaactacctgcgcccgggcgacgccgtgatcctcctgcacgtgcgtccca

SEQ ID NO: 87141 - DNA, 244 bp, Glycine max
  Clone ID: 700909775H1
cacagacaatcatttatatactatacaatatttcgccgttcgcaccattgcaacacgcaagtgttgttgctgattcatttcgctccagtcttgtctctttctctctgcagaaccaaaccaaaaggttgttttttccgggcacaattttttgtggggttcatcaaagttcgctccttttctgcaaaagaaatttcgcccaaaactgtaatcaatacagtactttgtattccattttggataatga

SEQ ID NO: 87142 - DNA, 244 bp, Glycine max
  Clone ID: 700909777H1
atccccactgttctgtacatccaaccaacttatcctcactccaaaaggattcaccgagacagtttcatcaatcaaggcataattcctcggcattccatcatcatcatcataaaccgcccacacttggcctttcttaaagcttcttccaactctatctttgtcaaaatcataaaaatcagaatccaccaccgccatagtctccaactcccctccactagaaccccccctatgcttctcaattatc

SEQ ID NO: 87143 - DNA, 242 bp, Glycine max
  Clone ID: 700909779H1
agagttttctcttttccactgaaaatcaaattacggtttggatttcggaattgccacagaatcatggccactctgaaagagcttcttcctcctgcaaaatcctcctccaccgcctactacgaccacaccaacgatccatggttcaagcagcgtttctcctcagaagaggaggagaaatccgccgccgccgccgccgccaagcagaagcccgttcccccctacctgaagcgcgccggcttcgt

SEQ ID NO: 87144 - DNA, 226 bp, Glycine max
  Clone ID: 700909780H1
aatttaagtgaggagctagagaatgatgatgaagtctgctatgtgtgcagtggtggttgtagcacttcttcttctggcggaggtggggcccatggctgaggctgtgacatgcaccccaacagagttgagtccgtgtcttccagcaatcacttccggtgctaaaccttccaatgcttgttgcacgaagctgaagcagcaaaaaccatgcttatgtggctacttcaaa

SEQ ID NO: 87145 - DNA, 247 bp, Glycine max
  Clone ID: 700909781H1
gcaattggttggcatcagtgccatgctgatggcatccaaatatgaagaaatttggactcttgaggttgatgaattagtccgcctcacagattatactcatgaacaggttctggtcatggagaaaaccatattgaataagctggaatggaatttgactgtgccaacaacttttgttttcctggttcgtttcatcaaggcatcagtcccagatcaggagttagaaaacatggcacattttctgtctgag

SEQ ID NO: 87146 - DNA, 247 bp, Glycine max
  Clone ID: 700909782H1
ataatgaccagttctcgagagcgtttggtgaaggcggtgaagcagtttgtggaggttcgctacaaggttttcggcgaccgttatggccaaaacatcatcgacatcctcgactttccgattaaggttgtcttgtctcccttcactctcgccttcgatattgcaggctctgctcctcgcggcttcggcgtcccggaactcatctccaagctctctgccacttccgtcttcgctatagctgctcttggga

SEQ ID NO: 87147 - DNA, 245 bp, Glycine max
  Clone ID: 700909783H1
ttgatctctttcactctcagccgccattctcccacttccaactccttctaccctaccttctttgtccatcccacccccgccaccgccgaatccaccactctcgaaatccaatcatgtctgccacatccgtcaactccgaacgagcacgcgcccctcccgccattcccttgccccctccccctctctccaacttcaaaattggcctctgtcaactctccgtcagccccgacaaagacagcaacatc

SEQ ID NO: 87148 - DNA, 246 bp, Glycine max
  Clone ID: 700909784H1
ttcccaatcaagtaaagatttagattagcaggaatgaagaagaatggagtatagtagtcatcaaccttgttagcagtctcagtcacactgtaaatttttggttacttatctctcaaaatctcaaatgcatatgcaattgcaaagcatttccgatcctgagggagagaacttttgtgacagctgtatccactccgattgttgattttttattttctttctcgcggcaagatctcactctgcacctag

SEQ ID NO: 87149 - DNA, 245 bp, Glycine max
  Clone ID: 700909788H1
ccgttctctactgtccgatctgactcactgagttgctttctctgctcgactcggatgagttagaccggaagatcgcgccgcattaatcgccatgtctgcaccagtgaatattattgtaggttctcatgtctggattgaagatccagcacaagcatggattgatggagaagtttctaaaatcaatggtgaagaagtccatgctcgcaccacagatgggaaagcagttgtcaaaaatatttcaaagg

SEQ ID NO: 87150 - DNA, 239 bp, Glycine max
  Clone ID: 700909789H1
gtttatttgaacaactgaaaaaacaacactcttcaggcaaagagaagtagtaatatttttcagacacgtatgtgaaaagaagaagttacttgtcgatctcagcaaaattggttatttttatgaatttatatgctagtaagttagtcacaatattcaaagtgtctgtttatttttatgttcatcaataatgtatatgtcaagtcaaacttatgtgtcatctatcatgtttgaattcatcc

SEQ ID NO: 87151 - DNA, 239 bp, Glycine max
  Clone ID: 700909790H1
acccaccctactacctcatcatcttccgatccctatacttttattgtgtgtgtttgagcaagagagagcgcaatggaaggtatctcaatgggtttgaagaagtactggagaagaagcattaggggataccaaagattacacgtgtcggatcggcgaaagaaggaaacggttcaacttggagggtgccaaagaaggtggagatggcgcataaagatggctcctaagatgagaattcacaa

SEQ ID NO: 87152 - DNA, 243 bp, Glycine max
  Clone ID: 700909791H1
gtttatttgaacaactgaaaaaacaacactcttcaagcaaagagaagtagtaatatttttcagacacgtatgtgaaaagaagaagttacttgtcgatctcagcaaaattggttatttttatgaatttatatgctagtaagttagtcacaatattcaaagtgtctgtttatttttatgttcatcaataatgtatatgtcaagtcaaacttatgtgtcatctatcatgtttgaattcatccgaaa

SEQ ID NO: 87153 - DNA, 119 bp, Glycine max
  Clone ID: 700909793H1
ctcacacacagatctctctatctatcgttcattgtcgtttcaatctcaaacgccatggcgttttggagatccctcgcgttctctgcgatccttctctcgctcttcatccatggcgctct

SEQ ID NO: 87154 - DNA, 219 bp, Glycine max
  Clone ID: 700909794H1
gtttgtgggaacattatggagcccagattcgtaatctccgcatcggaggccgaatcccaatcaatctccaaactcctcccttccctcgtttcctcttctcagtccctcgcccgtccttccatctccaactttcccgtcgccgccgtcggactcgccgcctccggccgcatcttcgtgggcgtgaacgtggagttccccggcctccccttccacacaaca

SEQ ID NO: 87155 - DNA, 235 bp, Glycine max
  Clone ID: 700909795H1
attggagctagcctgacatgccttgttagccaacgaaggtggttcggttggtaagaatacgatcaaaacacttgtgtaaacatggcttaaggggataagttcttttggttttcagatgtggaatttgctagggagactttggcatgtgtcaacccatatagcatccaattggttaaggaatggcctttaacaagtaaactagacccgcaaatctatggtccacaggaatcaacaa

SEQ ID NO: 87156 - DNA, 79 bp, Glycine max
  Clone ID: 700909802H1
gggttttgttgttgctgtcaatggatttgagatggtgatcgggatttgagccaacaataaaaatatgattccgttgttg

SEQ ID NO: 87157 - DNA, 243 bp, Glycine max
  Clone ID: 700909804H1
cccaattcttccccctccacccacccagcatatctctctattcctatttattagcacccctcacattaccttgtgtcaccaactactttgactcctttaccataccattacaataattatcaaacctaaccagtaaaaatggtgaccgtggaggaaatccgcaacgctcagcgttcccatggacccgccaccatcttggccttcggcaccgccacgccgtccaactgcgtctcccaagccgat

SEQ ID NO: 87158 - DNA, 241 bp, Glycine max
  Clone ID: 700909805H1
aaagttacaaatttaaatgaagtgcttatatctcttattagtactattgtatgtagaattgttttggggagaaggtatgaagaggagggatctgaaggtagcagattccataagttgttcaatgagtgtgaagctatgttgggtaacttctttgtttcagaatatattcctttcatgggttggattgataaactcaggggactggatgcacgtcttgaacgcaatttcaaggagatggata

SEQ ID NO: 87159 - DNA, 241 bp, Glycine max
  Clone ID: 700909806H1
taaacatattacaacttcttcttcttcttccattgaccattgttgttgttgttgcttttgttcgttctcgccatgccaatgttgtcttcgagaggcttcatcgcttatctcgtatctgctttctcttgtgctgttctgtctgcgctttttctcaccaaccacatccatcatgatgataacaagccaattactttgttagcctctcgtgtgtctgaaactcttaaagtttggccagacttgg

SEQ ID NO: 87160 - DNA, 230 bp, Glycine max
  Clone ID: 700909807H1
aggctcataaatcttttttatgggtttcagggtcactactactctgtctctgctctccctgttttggctcttgtccctgcaccaagcaagagctgcaaagttccacaatgtgagtggctcgagagggaaaaagccagttgtagcaaatgggtgcaatttgttcctgggaagttgggtggttgacacgtcttatcctctctatgactcttcaacatgccccttcattgatc

SEQ ID NO: 87161 - DNA, 241 bp, Glycine max
  Clone ID: 700909808H1
aattgactcggggtgagtttcctcagcgatggcggaagaggtgactcgggtgatggtggcagtgaacgagtcgagcatgaagggataccctcatccttcgatcagcagcaaaggggctttcgaatggaccatcaacaagatcgttcgcaacaacgtctctgccttcaaccttctttttcttcacgttcaagtccccgatgaagatggttttcatgacatggatagtatctacgcatcgcct

SEQ ID NO: 87162 - DNA, 239 bp, Glycine max
  Clone ID: 700909809H1
actcattctccatacctcaacgaagatgttaaagagacggcaacactttgctgtccgccttgaccgagcagagcttcgtcatggccctcgattttgccctaaagtactctcagtcacaacagacaccgtcgtcgtcgtcgtcgtcatcaatggcaccgaagcagaccaaggctgagaagaagatcgcttacgatgcgaactgtgcgacctaatggaggagtacggccagatcctcgttg

SEQ ID NO: 87163 - DNA, 238 bp, Glycine max
  Clone ID: 700909810H1
acttacttgaagttgtgctattcaatcccaaagccacagaaataatattattcagattttagagactgaaaacatcatggccaacctcgacctcgacccattccagacaagcatcttaatcctcgtcccaatagcactcctggtggcgttactatctcgtactcgtcgaagagcaccctacccaccaggcccaaagggtttaccaatcataggaaacatgttaatgatggagcagcta

SEQ ID NO: 87164 - DNA, 237 bp, Glycine max
  Clone ID: 700909811H1
gagaaaggaaggaaaaatggagttgttcttctacgcggtgttcggcggtttgggagcggttgttgcagtgacggagctgagcaagagcaacaaggaccgaatcaacacctcttccgcattcaattccttcaagaacaactacctcatcgtctattccctcatgatggctggagattggctatcaggtccatatgtctactaccttttacatacatatggatatgggaagggagacat

SEQ ID NO: 87165 - DNA, 234 bp, Glycine max
  Clone ID: 700909812H1
ggaagagttgcaagagcatgttgagtcgattgacatggccaatgatctccactcaattggtggtttggttcctcttcttggttacctaaagaattctcatgccaatattcgagcaatggctgctgatgttgtgaccacaatagtccagaataatcctcgaagtcagcaacttgttatggaagcaaatggctttgaacctcttatttctaattttagttcggatcctgacgtgac

SEQ ID NO: 87166 - DNA, 237 bp, Glycine max
  Clone ID: 700909813H1
gtgcccgtttagaattctgatgctcttgttttccctttgttccttttcccttaccacccaaacagctgagctctatgaagcctgcagcctgcctactgcctaaaccagaagacctgatgaaccagggtttgacaaacttatggcccaccctgaagcttctacttagaggaccaaacatatgtggagactattgaaattggccatgtccattttaccttaattcccaagcttgataac

SEQ ID NO: 87167 - DNA, 240 bp, Glycine max
  Clone ID: 700909815H1
aggaacgtgaaagtaaaacggacggtggcgatagaagcgtctctcatctccatcgtctcctcactcctctcttctccagcgttcattttttctcgcgcccaaatacaaaatcacatcacaacagggttccggcgaccatgtccgatgctccggcgagtccatgcggcggcggcggcggaggcagccacgagagcggcgagcacagtccccgctccaatttccgcgagcaggaccgcttcc

SEQ ID NO: 87168 - DNA, 245 bp, Glycine max
  Clone ID: 700909818H1
caagcctaagcctaagcccaagcccgctgcgaaagccaaggatactaaggcaactaaatcgaaggcaccagctaagcccaagccagctgctaagcctaaagccaaagctccagccaaggccaaacccgctgctaaaccaaaggcttctgctgctgccaagcccaagcctgctgccgccaagcccaaagccgctaaaccagctgccaagtccaagcctgctgctaaaacaaaggctgttcctgcca

SEQ ID NO: 87169 - DNA, 239 bp, Glycine max
  Clone ID: 700909819H1
cgcttggttacaagaagagcggggcacgcctagaggaggagtctggcatacctttgcattcgtccgtagtgaatcagtttatgcagcatatacttgatgggcattgggacgagagtgtagccacattgaataaaattggtctagcagatgaaaatgttgtccgggcagcttcgtttttgatattggagccgaagttttttgagcttctggatggggaaaaggtcatggatgctttgaag

SEQ ID NO: 87170 - DNA, 241 bp, Glycine max
  Clone ID: 700909821H1
attactatacacaccctctttctcctcctcctccttcttcttctactccttctttctctttttcattctttctttcaacatgggtggcatcagcctcgaagaaataaaaaacgagaacgtcgatctggaacggattccaatagaggaagtgtttgagcagctgaaatgttcaagagcaggtctaacatcagaggaaggggccaatcggctccaagtctttggaccaaacaaattggaagag

SEQ ID NO: 87171 - DNA, 239 bp, Glycine max
  Clone ID: 700909822H1
cacacacacacacacacaaagagaacttttcagcttcactcttcatttcagttcaattttaaacatgctttgcgtcaacactgccttcacctctttcttacccagaaaatcaacttgcgtcttttcctccaaatcaaccaccccaatttcctgcaccctccaaggaacagttgcagagccaaaatctacagctgctgctgaaccgcttttgctaaatgcagttcgcgggatagatgttg

SEQ ID NO: 87172 - DNA, 240 bp, Glycine max
  Clone ID: 700909824H1
gtttgtgttcgacagaacaggaacctcaaacctttgtgtcgagaatcttagccatgggtagcaacggtttgaggtacgaaatcgctcaaaccgcttacatcaaattcatccttcactccctcaaacacccaacctccgccgtcaacggcgtcttgatcggtcgcatctccgcttccaacgacgtcgtcgagatcgccgatgccgtccctctcttccactctcacatccctcttcttcccc

SEQ ID NO: 87173 - DNA, 238 bp, Glycine max
  Clone ID: 700909826H1
aaaatatagaacacactaccctcaacatagtaaagcagctggtgcaagtgaagcaatggctcaaaccatgttgctcatgtctagtgtctctagcagttattccgtggatttgaagaaagaccttttcctccaattgcagagtcaaagtttaaggcctaagttctctcaactctcattcaacccacttccaccatcaacttcttccgtttcttcaccccgtacattcacaaccctggct

SEQ ID NO: 87174 - DNA, 236 bp, Glycine max
  Clone ID: 700909827H1
cctttatctcgggacttctaagaagctctccctctccagaaatggcatatgctccaagtgcactggtaagggttctaagtctggtgcttcgatgaagtgtgctggttgtcaaggaactggtatgaaggtttctataagacatcttggcccgtccatgattcagcagatgcagcatgcttgcaatgaatgcaagggtactggagaaaccatcaacgacagagatcgctgcccacagt

SEQ ID NO: 87175 - DNA, 237 bp, Glycine max
  Clone ID: 700909829H1
aggcagttgaagtgacggaagagaagaaggaagtggaagtgaccgaaggaaagaaagaagtggaagtgatcgaagagaagaaggaaacagaagtgacagaagaaaagaaagaagtggaagtagaagtgagggaagagaagaaggaaagtgaagtgaaagaagaagaaaaaggtcgggaggttgttccagaggaagttgagatatggggaattcccctgctgggggacgagaggagcg

SEQ ID NO: 87176 - DNA, 239 bp, Glycine max
  Clone ID: 700909831H1
ctcaaaatttcgccctctttcattcaattctcttctctgctcttctcgtctgttcccaccttctgatccatcatccctcgttttctccgaacaatggctgctggtgtcactgtcaagtccgaggttctagaatcttctccccctgaaggagtatgttccaacacggaggaaaaccacctggttcagaccaatttgtctgatgggtcacccaacaagtctgtgccagcatctggacttaa

SEQ ID NO: 87177 - DNA, 240 bp, Glycine max
  Clone ID: 700909834H1
gagaagaatcactcactgatccacacacaaaccagaacaaaaccaagcacagacagcgtgcgctcttcttgtgatttgtgttacaagcaaccaaccacactcacacacacccctccataataaaaatcacttccatgctctcttcttcaccccaaccaaaacaaacaggtttgcatttgcttaactggagccagattctgtagctgatttcatcccaataaatctaatgatgcttaagta

SEQ ID NO: 87178 - DNA, 236 bp, Glycine max
  Clone ID: 700909840H1
ccaaagctgtattgtaattagggactctgacattatagacgaacatgttaatgttaatgttagtgtccctcgtgaagttgagagcactgatcaaacaattgaggacacagatcggttttcattctcaacagctaccaactcaaccgtgtacctctcgtgctcagacattgatgaagatggaacctcgttgtccccacataaagacaaagctttgttttctccaaacacttgccaag

SEQ ID NO: 87179 - DNA, 235 bp, Glycine max
  Clone ID: 700909841H1
agattaggttgccctgtctgttctctcacacactcactctccttctctctcctattgcggctagggtttgggtttttcactttcagcctctccattccttcaaccttcttcttctctttgatctctgatggagacgttccgtgtttagtagcaagggttagttgaggccttgtgtttggaaacgtacggtgtcgttttggagttgggaaaacaaataattctgagagatggcaac

SEQ ID NO: 87180 - DNA, 236 bp, Glycine max
  Clone ID: 700909842H1
gtttaaacctaattctcatttcttcatcgttcgattcttctcctcctaaagatgcagatcttcgtgaaaactttgaccggtaagaccatcacccttgaggtggagtcctccgacaccatcgataacgtgaaagctaagattcaagacaaggaagggatcccacctgaccagcagagacttatctttgcgggtaaacagcttgaggatggtcgaacccttgccgactacaacatcca

SEQ ID NO: 87181 - DNA, 235 bp, Glycine max
  Clone ID: 700909843H1
gttttctcgcgattgcccagaacgaatatttcttttccccccgtttcctctttccaaagactgtaagaatgatttaatgtgttgtgtgtataaatcgatacaaacaatactgatcccagattaatccaacgacgaccatcaaatctcaccatccaaaccctaatctgaaaccatcgttccttctatttcactctctacaacctccaaattccgatctcatattcctctcctcgct

SEQ ID NO: 87182 - DNA, 238 bp, Glycine max
  Clone ID: 700909844H1
cttggtcctttctctaatccaaatatctctccgttaatgctctcaccacaaacttcaatagactagccaaaagctaacaccaactataggccaaatcaccaataaatattatttacccgtctctttatgtgcgtgtatggccacccactgaacacatttgcactcacacatagatactcagagaggccattggttggtttcagagatgggcagcatgcacataggaaccccagatact

SEQ ID NO: 87183 - DNA, 236 bp, Glycine max
  Clone ID: 700909845H1
caattgcatataatttcttttaaaactaaagaagtgcaaattatgggacttgaattctggaactaatatacttaacagtggaagttagtgccacaagaccaataagtatctcattcaatttgaaataacaagtaaatgccatatcaaatgaagaatccaacctttatatttttgttcatcattttcagataacgtccagtgccagtaacggtgccaccagttccaatcccagctac

SEQ ID NO: 87184 - DNA, 232 bp, Glycine max
  Clone ID: 700909846H1
cagggtcttaaattgtagtggcattgcttttctgatcaaagtgacacactagtgtaagggattgtgatcacaatcccttacactatcgtttcactttgatcagaaacaaaacaaaaacactaagtgacacgagcagtcatattcatcactgtgccacgttttactgattgcattggtagtaggtatctactaatggtcatgccaaatgtccaattcctatcaataattgaag

SEQ ID NO: 87185 - DNA, 242 bp, Glycine max
  Clone ID: 700909850H1
atcaacaaggagaagctgttttcgttcgtcgccactaacactaatcgtttcttcaatgccttacgagaaggaactcgccgctgcaaagaaagcagtcactctcgctgctcgtctctgccagaaagttcagaaggctcttctgcaatccgatgtgcactcaaagtcagacaaaagtcctgtcacagtggctgattatggttcacaagcattggtcagctttatacttgagagagaacttcctt

SEQ ID NO: 87186 - DNA, 238 bp, Glycine max
  Clone ID: 700909851H1
gtgacaagagctttggtgggaacaggtggccaagacaagagactttggctttgttgaagatacggtcggatatggacgtggcttttagagacgcaagtgtaaagggtcccttgtgggaagaggtttctaggaaactggcagagcttggctaccacagaaatgccaagaagtgcaaagagaagtttgagaacgtttacaagtaccacaagagaaccaaagaaggtcgaagtgggaaatc

SEQ ID NO: 87187 - DNA, 240 bp, Glycine max
  Clone ID: 700909853H1
attcagaataacaataaagggtggatgaggatccagaggttcttggccacactggccataactgtctccatactcttgggaaatggaaaccccgttcagtgcttcgacggcggtagccaccaaaaacagcaacacagtttgtgtgaagagctcattatcccctacggttacccctgctccgagcatacgattcaaacgaaggatggtttcttgttaggtcttcaacgtgtctcttcttct

SEQ ID NO: 87188 - DNA, 237 bp, Glycine max
  Clone ID: 700909854H1
ccgcaacagagagtagaaaagatggcgcggttgatcacagtggtgtggtgcgcggtggcggtgctactgtgcgccgcggcgggcgcgtcgtgggtggaggaggcggcgaacccgatacgaatggtggcgggggtggaggcggaggtggttcgggtgataggggcgtgccggcgcgcgctgaagtttgctaggttcatgagcaggttcgggaagagttaccgaagcgaggaagagatg

SEQ ID NO: 87189 - DNA, 163 bp, Glycine max
  Clone ID: 700909855H1
ctcccactctcgtatcatgattctgttgtttctgctctccttgggcacagcatcagaagaaaagaagacaacatacatagtgcaagtccagcaagaagccaagccttccattttcccaacgcacaggcactggtaccagtcttcccttgcccttgccgacagc

SEQ ID NO: 87190 - DNA, 71 bp, Glycine max
  Clone ID: 700909856H1
ctgattgtttttattccccataaaaataacagtttattatattgttattatgataaatacaaaagaaaaag

SEQ ID NO: 87191 - DNA, 235 bp, Glycine max
  Clone ID: 700909858H1
gtcgcgaagagtgactggacgaatcataccgacaagcccttgagactcggcgactacatggcgccgcctcccaagccagtgccatggaacgccgacctaaacaaaattaatgaaatatttgagagtgagaaaagtggtgctgtggctttggagaaggatggtgaggttgacgatttggtggtgagggaggaggtggagagggcctcgggttacccgaaactggtggcgccggcga

SEQ ID NO: 87192 - DNA, 234 bp, Glycine max
  Clone ID: 700909859H1
tttcgcgataccaaaacctcagcaatcaacaatgtcgttcttctcaaggcgccgtcgcgacgacgacacggtggacgactacgacgagtacgaccccaccccttacggcggcggctacgacatcgccctcacctacggccgccccatcccaccctccgatgagacctgctaccctctaggagcctcttcttctgatgacaacttcgattatgatcgccctcaatacacctctaa

SEQ ID NO: 87193 - DNA, 235 bp, Glycine max
  Clone ID: 700909861H1
cagcaccagccgaaagccaagaaaaagctttcgatccctgtaactgcgttcgactatttagggttttttcggagacaatggcggatgaatcggagcacacggcggcgccggctgccggcgaatcgctgctcgacaagatcgccgagaagattcacggccacgacgactcttcctcttcctccgattccgattcggataaaaaggaatcttcgtcgattaaggagaaggttttccg

SEQ ID NO: 87194 - DNA, 238 bp, Glycine max
  Clone ID: 700909864H1
cttcaatttggaagaaatcactcgaatttgatcgtacaagattcttagatgcaaaattggatttcagtggcaatgacttcaactatttcccctttggatctggaagaagaatttgtgcaggaatagcaatggctgagaagacggttttgcattttcttgccacactcgtacacttatttgattggacagtaccccaaggagaaaagttagaggtatcagagaaatttggaattgttct

SEQ ID NO: 87195 - DNA, 242 bp, Glycine max
  Clone ID: 700909866H1
ggagacaataaaaaaattgaaagaagaaaatgaagtgcacattcaggaagaggccatatcaaaggagacaattaaaaatctcaaagaagaaaatgataaactacttcagaaagtggtttccttggaagaggtcatcaataatttacaaactgataatgaattgcagatacaaaaacatactagtctggaaatgagaattgcacaattgcaaagtgagaataattccttacttcaaaaagagg

SEQ ID NO: 87196 - DNA, 234 bp, Glycine max
  Clone ID: 700909868H1
aacacaacaacactctctcttctcgctcttggcttttcgctcttcactcactctcattcattcatttccaccgttcatggatcccgtaagcgtgtggggtaacacgcccttggcgacggtggatcccgagatccatgacctcatcgagaaggagaagcgccgtcaatgccgcggaatcgagctcatcgcctccgagaacttcacctccttcgccgttctcgaggccctcggcag

SEQ ID NO: 87197 - DNA, 236 bp, Glycine max
  Clone ID: 700909869H1
aaagtttcttcctttctctgctctttgccttctctgacacatttggtgccttgtagagcgtgttttggcaggaaggtggtatggcgaaggacgttgaggttgctgagcgtggctccttctctgggaaggactaccaggaccctccaccagcaccactcattgatgctgaggagctcacaaagtggtccttttacagggctctcattgctgaattcattgccactttgctcttcctc

SEQ ID NO: 87198 - DNA, 237 bp, Glycine max
  Clone ID: 700909870H1
ctttcttcttcttctcttaaaagagcctttgctttttctttaggcctttccgaattaagtacttgtttcattttctctagaagcaagaaaaatgttcatcgagagtttcaaggttgagagtcctaacgtgaagtacacagagactgagattcagtccgtgtacaactatgaaaccactgaaattgttcacgagaacaagaatggcacttatcagtgggttgtcaagcccaaaactgt

SEQ ID NO: 87199 - DNA, 235 bp, Glycine max
  Clone ID: 700909873H1
cttgcttccaatacatacctggttggccattctgttacccttgctgctatcataacgacgtgcaacttgtatttaggattcagccagctcttagttaagagcttcacctccgagttccctcacgtcgagaggtacttttggacattggtcaaccagcctaacttccgaaagatattaggtcaggttaagcatactgagtctgttccacccattccatccgctgcaaagaagcctt

SEQ ID NO: 87200 - DNA, 238 bp, Glycine max
  Clone ID: 700909874H1
gagatcgtcccaatgctccattggtgcttaagggcatcacttgtacttttaaagaaggtagtagagtgggagtcgtaggaaggactggaagtggaaaaagtacactcataagtgctttgtttcgcttagttgatccagcaaaaggttatattcttatagatgggattaacatatgctcaattgggttgaaggatttgagaatgacgctaagcatcatccctcaagaaccaactctttt

SEQ ID NO: 87201 - DNA, 232 bp, Glycine max
  Clone ID: 700909876H1
aaatcaatagccatgaagatcgttcggagagacctagtacctaatggacctggcagcgttaagatggtggcagtggattcggatgatctctggtttgcgtataacttgatagctcccggagactctgtcatggccgttactgtcaggaaggttctaagagaagctgcttatggcggacgggaagcagaacgcgtcaagctcaaattggaaattaaagtcgaagagctttctg

SEQ ID NO: 87202 - DNA, 235 bp, Glycine max
  Clone ID: 700909877H1
gcagaagcctcctctgcctcgcaatcatcggcattgtcgtcgccgccgtcggaggtcagtctccagcggcggctcccaccacttcctcggcatccccagccacagccccttctaaacctaaaccaaaatcacctgcgccagttgcttctcccacttcatctcctccagctgcattccccaatgctgcaaccgcaacccctcccgtttcgtctcccacggtagcatctcctccgtc

SEQ ID NO: 87203 - DNA, 234 bp, Glycine max
  Clone ID: 700909878H1
tttcaaccccatccaatcctcacatgcatgctgtctctgccaaagtgccaagtcacataacatttccattgttaccattctttctttccatcacaaccactaaacaaacctctgatcctcactttctctcacacaaaaacacactcaccatggatcatcgcaaaccattgctacccacttcctctgatgctgctcaattccacacactcgcaaggaccttcttctagttatttg

SEQ ID NO: 87204 - DNA, 237 bp, Glycine max
  Clone ID: 700909880H1
caagaactctccaaggatcctccttcccacgcaattcatttggtgggaaaatccaagaagagggtggaatttcaagccagggaagatggattatttcaatgcaccaggaagataccatctctttgttccggggccggttaacatcccggaccagatcattcgggccatgaacagtaacaatgaggactaccgttctccagcaattccagctatgaccaaaacactgcttgaggatgt

SEQ ID NO: 87205 - DNA, 241 bp, Glycine max
  Clone ID: 700909882H1
gccataactcactcactcgcttcttctctgttctcaccaatggcatcaacaatctcagcaatggccatgatcaacgccaaatgcgtcaacccaaagttccccaatcccaccaagctcgcaccatcaaaaccctcccttcagatcaaccttccaaagggcctcatagcctcacccgaaagcactaaactttcccccgcgacagcaatcgcaggagcaatattcacaaccctcggaacctgcg

SEQ ID NO: 87206 - DNA, 237 bp, Glycine max
  Clone ID: 700909883H1
ggaaaaggcgtcttcataaacgccgcccaaaacttctcatacccttttattcattccattcgtttctagggttttcttttctttgccgagaaaatgagagagtgcatttcgatccacattggccaggccggtatccaggttggaaacgcctgctgggaactctattgccttgaacacggcattcagcccgatggacagatgccgagtgacaagaccgttggcggaggagacgacgcc

SEQ ID NO: 87207 - DNA, 74 bp, Glycine max
  Clone ID: 700909884H1
tttcgttctgttttggcttcgtcgctgcaactctctaccttccctctttttccgaatctgaatagaaatggctt

SEQ ID NO: 87208 - DNA, 237 bp, Glycine max
  Clone ID: 700909885H1
gagccttgaaccttgaaccttgaatcttgagccacgagccaccctcagactcagtcaccaacaccgaccaacgcaacaatggcatcggcgttcgtcaagctcgacgattcccctatgttccagagacagttatattctcttgaagaaacaactgatgagttaacggatcggtgccaaaaactatataaagggtgcaagaagtttatgacagctttgggggaagcatatcatggagaa

SEQ ID NO: 87209 - DNA, 236 bp, Glycine max
  Clone ID: 700909887H1
tttcgagacctcagcttgactatccattctggcaagacagtggctcttgttggtgaaagtggaagtggaaaatcgacagtgattgccttgttgcaaagattttataatcctgattcaggccaaatcacacttgatgggatagaaattcgtgagttacagctcaagtggttaaggccgcagatgggtcttgtaagccaagagccagttttgttcaatgaaactatacgtgccaatat

SEQ ID NO: 87210 - DNA, 93 bp, Glycine max
  Clone ID: 700909890H1
caaaaccccgtaatgatgctgatgtttctccttcactgctactagtagtgtagttagcgtggtctgcttgtgccgccttcgcttcttattttt

SEQ ID NO: 87211 - DNA, 231 bp, Glycine max
  Clone ID: 700909891H1
cggagacgcagtgcccgggccaatgcgcgtggcccttccagcagcccatttacggcccacagaacccgcccttggtcgcgcccaacaacgacgtgggcctcgacggaatggtcatcaacgtggctaccctattggctgggaccgttaccaaccctttcgggaatggctacttccaaggacccaaagaggctccgctcgaagccgcttccgcttgcaccggtgtgtacggaa

SEQ ID NO: 87212 - DNA, 229 bp, Glycine max
  Clone ID: 700909894H1
caacttgaagctagaagagaaatttgattgctggaagttacctacttcctagattattctttatacaacatgtactgtaaacgcctgagaaattgtggttttgtaagttgttttatctgtgaaattaataggctaaatgtagatctgtataaagagttttgtgatcttgtacagtagaggtatatatgatgtaaaagtggaatgaaatgaatgtatctttcccacgcct

SEQ ID NO: 87213 - DNA, 241 bp, Glycine max
  Clone ID: 700909895H1
cttcccttctccatcatgccaaacgacagcgttctgagtcttttctccttcgttaccctcttcacatgccttctctctgctaattcccacgatgaccatattttcctaccgagtcaactccatgacgatgactcagtgagttgcactgctaccgacccaaaccttaactacaagccggtgatcggaatcctgacccaccccggcgacggtgcctctggccggctcagcaacgccaccgggg

SEQ ID NO: 87214 - DNA, 264 bp, Glycine max
  Clone ID: 700909902H1
cttgacccctaaattcgtgcccattcccacaactgcacattcttctttctatatattccaaatcccttttccgatttccaccaaaatctaaacccaaattcccaattacccttcccaattttcaccaaaacctaatactcccacaccaatcttcgatgctggacgccgattcacaacctcaacaactcgaagagagaacagaggagcaagaactgaagtacctggaattcgtgcaattcgcgaccatacaggctctgatgcgct

SEQ ID NO: 87215 - DNA, 260 bp, Glycine max
  Clone ID: 700909903H1
gtgtacatagagagattaggccaagtcgatgccacgaagatgatgcaagtcacaaccatggatcgctacatcaaataccacgtaaaggagtttgagaggacatttgatgttaagtttgcagcttgttcaattgctgcaaagaagcacatagatcaaagttcaactatcctggacgtgcagggagtggggcttaaaagcttcagcaaacatgctagggaacttgttactcgccttcagaagattgacggtgacaactatcc

SEQ ID NO: 87216 - DNA, 258 bp, Glycine max
  Clone ID: 700909904H1
gttcgttgtcactgcagtcgccaccgacaccagagctgtgggagaactcgcgggaatcgcggtgggagcgactgtgatgctcaatatactcatagcagggccagtatccgggggctcaatgaacccagtaagaacactaggtcctgctgtggcggcaaacaactacaaagccatatgggtctatctagtagctcccatacttggagctttagctggggcaggtacctacactgcagtgaagctgcctgaagaagatga

SEQ ID NO: 87217 - DNA, 154 bp, Glycine max
  Clone ID: 700909906H1
cgctctgttactgtctctgtgtttgcggctgaggattccgaacgagcgaccttcttcgtttctcgcaaagtttaagtcatcatgggtaaggaaaagactcacatcaacattgtcgtcattggacatgtcgactctgggaagtcaactaacactg

SEQ ID NO: 87218 - DNA, 155 bp, Glycine max
  Clone ID: 700909907H1
gtttttgtcgatagaagccatcagtcatggataggcttctatcatcgtcttcacccccttcttttacatttctcactcgattcgaatctgcaactgcaagattcaatttctctccgtcaacacgttctcactctcacttgaagcggctctcctca

SEQ ID NO: 87219 - DNA, 255 bp, Glycine max
  Clone ID: 700909910H1
atttcaatacccttgctgggacacgcgccatatctccgttcactgctccaccaagcattgtacaggctatcactgcgctatggacccttgatccacgtcatgatcggttcgaagcacgtggtggttccgtcgtcggcggagacggccaagcagatcctcaaaacctcggaggaggcattctgcaaccgtcccttaatgatagcgagcgagagcctaacctacggcgcggcggactacttcttcatcccctacggc

SEQ ID NO: 87220 - DNA, 260 bp, Glycine max
  Clone ID: 700909912H1
gcctctgcttccgacacaaatcaatctttctgatcatatattattcttttgtttttttaatttattctccatacacatgcagacactaagttcgaacaagttcaggagcggcatggatttcttccaccgcgcgaaggcggtgcgcctccgcagccaccacgacaagtacctcctcgcggaggaggacgaggagtcggtgacgcaggaccgcaacggctcctccaaaagcgcacggtggacggtagaatacgtggccgaat

SEQ ID NO: 87221 - DNA, 257 bp, Glycine max
  Clone ID: 700909913H1
aatggaagttctatgttgccttttctatcatccgggcagctccaattcctgcaggagtgtataatagatgggttaagggtaatgcatcgggcggtgaacgtgctcgacacacagaagtacttacaaatggccttatagatactgcgtggaaatttattgaacacaaatctgtgcttcctcagcatccaccctcagatgcaaacgctcaagactattccaaagagttaccgaatgggactgatatcacaggtcctctc

SEQ ID NO: 87222 - DNA, 269 bp, Glycine max
  Clone ID: 700909916H1
gagcaccaattacgctttcacgagacaagctgttttgagaaatgggatccaaggttgttgcatccgttgcccttctcctctccatcaacatccttttcatttccatggttagctccagcagccactacgatccatcgcccccaccttgttacgtccctgctcctttaacaccatcaccatcattgtcaccaccaccgtcattgtcactaccaccatcgtcaggacctagttgtccggatctgagtgcttgcctcaatattttagacggg

SEQ ID NO: 87223 - DNA, 262 bp, Glycine max
  Clone ID: 700909917H1
aaaggattctacccgccgctcgatgggaattgcgcttcaaggcgtctcgtagggctaatccgcctcacgagggtcaccaacggcacgtgcctttggggggccgaggccccctactgctggtcggcaaacggacggcgggcgcacgcgtcgcttagaacccggattctgacttagaggcgttcagtcataatccaacgcacggtagcttcgcgccactgacttttcaaccaagcgcgatgaccaattgtgcgaatcaacggtt

SEQ ID NO: 87224 - DNA, 138 bp, Glycine max
  Clone ID: 700909919H1
cacaggctgcgcagtgtatgaacgttgaaggagagcgtagaggcagtggctggcaattgatgattgctctttggagaatcgaatcgagttaatttcggatcgtgtgagtgtccgatctagaaatccacaagatcaatg

SEQ ID NO: 87225 - DNA, 253 bp, Glycine max
  Clone ID: 700909920H1
ggcctggcaggagtcactgctgccacaactacttatccattggatcttgtaagaacacggctggctgcacagacaaattttacctactacagaggtatctggcatgctttacacacaattagcaaggcagagggaatatttggcctttataagggacttggaactacactcttgactgtagggccaagtatagctatcagcttctctgtgtatgaaaccgtgagatcttattggcagtcaaatagatcggatg

SEQ ID NO: 87226 - DNA, 242 bp, Glycine max
  Clone ID: 700909921H1
atcgcgagccgccgtccttttttttttttttttttttttttggggcgtgtttaaaagtttaccccattttttccatgtgacttctttggggttttttgtaaattttgttgttttggaaattaagccccccctggggttaccgtttggggattgtttccactgtccaatggggggggatttttggcaaatgtccaatttagggggggacctttaatgtcctatgccccgtaattttgggactt

SEQ ID NO: 87227 - DNA, 154 bp, Glycine max
  Clone ID: 700909922H1
gccggaaggacggaggattttctctctcaggtcggcctctccacgctccacagcgccgtcgcggttctcaaatcctgccaaaagattctccccttcgccgccgaggtcaacgtcgttgaccgctgcgttgaggtcatcagctgcaaggcttgca

SEQ ID NO: 87228 - DNA, 161 bp, Glycine max
  Clone ID: 700909923H1
ttggaatccaaaaatgagagacatcatcagcattcacataggtcaggccgggatccaggttggcaactcctgctgggaactctactgcctggaacatggcatccagcccgatggcatgatgccaagtgactcctccttcggtgtgagcctcacgacgcctt

SEQ ID NO: 87229 - DNA, 250 bp, Glycine max
  Clone ID: 700909924H1
atcatttcctatgcacttgctcctccaaaacccacccactcctgctaagcccctgtgttccagcagcttgaatgactcgtacctcattctgggttcctgcaatggcttactgtgtctgtatcatattcctcggtgttacgtagcgttgtggaacccttcaatcagattcacatcaaaaagattgcccaccggcttatcacctggcgagggttttagtactttccatggttttggctatgatgcagtaaat

SEQ ID NO: 87230 - DNA, 256 bp, Glycine max
  Clone ID: 700909926H1
attatgcaacgcgattaggaattaaaaaaatacaaagcttagcgacgcgggtttcttccataattaagcataattagtggaacagataatgttattttggcggtaatagattagatgctgaatgatgatggacgaatgagtgttagtttcagcaattctcttccgtaagcaaagagcagtagctgaaacaaacaaacgaacactgtaagcatgaacaagcgccaagaagatttgcgcaacatagctactaccctcg

SEQ ID NO: 87231 - DNA, 255 bp, Glycine max
  Clone ID: 700909927H1
gaatatattatccactcgtggagtgcttgagcaaggtgcatgcttagatgctctaatctcattgatggtggattcatcattcaatcaaatggatttcgagaaatgtagtggtattatggaagttgctgaccttctaagagaccaagaactggatgaagatctcaggttaaaatgtggagagtttttgctgctgctcattggacatgtcaatggaagagatacgcctcctttagcaactatacacgaagatacaag

SEQ ID NO: 87232 - DNA, 264 bp, Glycine max
  Clone ID: 700909930H1
tggtaccagagtagagtagtgcggacgccaagagaaacgaaatccctcgctttgagaaatgggtgtattactcttccggtgggttctgccactgactctgttgctcacttgcgcgttaggtttccaatcggacgagcttctcctcgacgaccaagagttcggcatcgagggaggacgagcctccttcgattccgattcgcacccatctcccacctccaccttgaggaagagcttttctgactcctcctccgactccaagatcca

SEQ ID NO: 87233 - DNA, 266 bp, Glycine max
  Clone ID: 700909932H1
gaactagtaccatgttgctgtcacaagccaaactgcacaacaacaacaacatctccaatgccattaacatgattatgaagaagaagggtaataacaataacaacaatcattgttcacctgctatactttatcactacccttgccctgatggtgcttttgctgcccttgctgcacacctttactttaaggccacttcatcattctctcctctttcctttcccaacactgtcttcaacccctcagtgctgaagatttcctctgaatga

SEQ ID NO: 87234 - DNA, 262 bp, Glycine max
  Clone ID: 700909934H1
gacaggttagttttaccctactgatgacagtgtcgcaatagtaattcaacctagtacgagaggaaccgttgattcgcacaattggtcatcgcgcttggttgaaaagccagtggcgcgaactaccgtgcgttggattatgactgaacgcctctaagtcagaatccgggctagaagcgacgcgtgcgcccgccgtccgtttgccgaccagcagtagggggcctcggccccccaaaggcacgtgccgttggtgaccctcgtgagg

SEQ ID NO: 87235 - DNA, 111 bp, Glycine max
  Clone ID: 700909935H1
gcggtccttaaacctatctctctctcactcaatcaatcagatggacatcggtttcatagactaccagttgcgctacgaccttcgcgcacacgaagacgacgttcgtggaat

SEQ ID NO: 87236 - DNA, 146 bp, Glycine max
  Clone ID: 700909936H1
ggctatataatcggtctctgttgttgatactggatccgtaaacctccacttgaagctacgtggttatatattctggggatacatgcatatctaagccaggatatatatcagggatgagtcacctaccatcaaacttgttggtcgtg

SEQ ID NO: 87237 - DNA, 254 bp, Glycine max
  Clone ID: 700909937H1
agagcattcaccattttcttgtggtttggtttcctagagacaagcagtactcccatggaacaaaacaacaaaagccttgtttcttctaaattcttatgtttatgtttgttgatcaccttgatcagcattattgttgctccacaagcggaagcagcacgagcatttttcgtgtttggcgattcgcttgtagacaacgggaacaacaatttcttggccaccacggcgcgtgccgattcatatccttatggcattga

SEQ ID NO: 87238 - DNA, 257 bp, Glycine max
  Clone ID: 700909938H1
ggcaaagatagtggcagagctccaagctgtgaagcacaacagtggcaagtcctacaatcagttagcggaggagactggactcaccaacgtctatgttgctcagcttctcaggagacaggctcagctcaatccccaaactgcccctctacttcgggcagcgctgcccgacctgccccaagaccttgtttctgagatgatgagaccccctttgaggtcttatgacctaatctcatccaagactccactgtctataggtt

SEQ ID NO: 87239 - DNA, 233 bp, Glycine max
  Clone ID: 700909939H1
gtgttttttcctggtgtgaaatatatttgtaaaacaagtgtattggattgtatatgtgatgttggtgctggatcatccaattttatgcatataaaaaattggactttgtattggagtttggtgctgattgacagcgttgttttcatgcactataatgtgcgtttgccctgttcttttgttcctctgcactccaagttgaatactttttgtaagtgtttatttttattataatc

SEQ ID NO: 87240 - DNA, 254 bp, Glycine max
  Clone ID: 700909940H1
gcccttttgctgaaaggggttttaattgccttgctaatgggagaaaagatagaggttacacaaaatggaggtggaaaactaagaactgtgagattccaaggtttgatgtccgtggaatactcgaacgacttcgtgggaaaagggtggttttcgtcggcgattctttgagtaggacgcaatgggagtccatgatatgtttgctaatgacaggagttgaggataagaagagtgtctatgaaatcaaaggcaacaag

SEQ ID NO: 87241 - DNA, 154 bp, Glycine max
  Clone ID: 700909942H1
cggtggcagcagtagcaaacgcacaccacaatcaaagaacaatttccactcgaagcaaagcgtatcagagatccaaactcagttctccaactctctgatctcaacttccacttcagcttcaagtcgcatggccaacgacgattgctgcgccacg

SEQ ID NO: 87242 - DNA, 256 bp, Glycine max
  Clone ID: 700909943H1
ggcttttgcaatactccccaagtctccggtgcactgcgcttgaagcatgtgcacatcctttctttgatgaacttcgtgaacctaatgctcgcttgccaaatggtcgtccatttccccctctattgaacttcaaacaggaatgatctggagcatcttccgagcttgttaataagttgatacctgaccatgtgaagcggcaaatggggatacagtttatgcatctgggaggatcgtgacgatacagcttacgggacat

SEQ ID NO: 87243 - DNA, 259 bp, Glycine max
  Clone ID: 700909944H1
gtcttgcaattgaagttgaagtcttgcccttctctcttcaactccaaacacaagacatcatcatccatggctgcctccgtctccactgtcggagctgtcaacagagctcttttgaacctgaatgggtctggacctggggtttcagctcccagttcatccttctttgggagcagcttgaagaaggttattggctcaagggtccccaacacaaagatttcctctggaagcttcaagattgttgctgtagaagagaagaaag

SEQ ID NO: 87244 - DNA, 258 bp, Glycine max
  Clone ID: 700909945H1
gcggaatttacatccaccaccactaacactaacagtaacagcggtctcaggttgaaagccaaagtagccatagtcaccggaggtgcaagtggcatcggcgaacgacggcgcgtgtgttcgcggagcaaggcgcgcgtatggtggtgctcgcagacatccaagacgagcttgggaatcaggtggctgcgtccattggaacccagcggtgcacctacatccactgcgacgtggcagacgaagaacaagttcaaaacctcg

SEQ ID NO: 87245 - DNA, 258 bp, Glycine max
  Clone ID: 700909946H1
ctcaaataaacctcaactcattgtgtgaccaaagttattattacattgcataatcaaccatgtcaatgaagttgtacgcttcccttacctttgtggtgtggcttttcatggccacatcgtccctagcccaatacgttctcgacacaaaccgcgaacgcgtcgacagcgatgatgagtactacatccggccagccataacggacaacggagggcgtttcacattgatcaacagaaacaggtcgtgtcctttgtacgttg

SEQ ID NO: 87246 - DNA, 264 bp, Glycine max
  unsure (1)..(264): unsure at all n locations
  Clone ID: 700909947H1
ccgagttcttgcactccttggaccaattcctcgttttgacattcattcccagaaaacttttccacacaccatattcttttcatancaaaattccaattttccttcacaaagaacacaacacaaacatgtagactcgcacctctgcctcaatctctgcaacatggattccatctttctctgtcttttcctacattattggtatgctcgtcacaagcaggatgtaggatccaacagaatcaaacttgttgcttctttcgcacatca

SEQ ID NO: 87247 - DNA, 266 bp, Glycine max
  Clone ID: 700909948H1
caccaattaagctttcaagagacaaactgttttgaaaaatgggatccaaggttcttgcatccgttgcccttctcctctccatcaacatccttttcatttccatggttagctccagcagccactacgatccaccgcccccaccttgctacgtccctgctcctttaacaccaccaccatcattgtcaccaccaccgtcattgtcaccaccaccaccgtccagacctagttgtccggatctgagtgtttgcctcaatattttagacggg

SEQ ID NO: 87248 - DNA, 263 bp, Glycine max
  Clone ID: 700909949H1
atcgacgaccacaactccgcggaggaccgaacctacaagctcggactgaaccggttcgctgatctcaccaacgaggaatacagggccaagtacttgggaaccaagatcgatcccaaccggaggctcggaaagaccccgagcaaccgctacgctccacgtgtcggcgacaaattgcctgattccgttgattggaggaaggaaggtgctgttcctcctgtcaaagaccaaggaggctgtgggagctgttgggcattctcagcaat

SEQ ID NO: 87249 - DNA, 258 bp, Glycine max
  Clone ID: 700909951H1
cacgcacacgcttgtataattatgtgtgaatcatcttgtttttttggctggtaattgatttttgaaaaaaggtagaggcaatggaatgatacccgtattttgtaacaacatccggcatgaattaatttgctaaatgcggtgtcagtgggagcggtggggcgtggcagaccaaaatgattataatgattcggtggtggaggaatcactgactgtgatgggccaactccattttctaccaaaagtgccgttcccagaccc

SEQ ID NO: 87250 - DNA, 252 bp, Glycine max
  Clone ID: 700909952H1
caaaaagaaagaatcccaggcgaggagaaagatggaggggaaggagcaggatgtgtcgttgggagcgaacaagttccccgagagacagccgattgggacggcggtcgcagagccaagacgacggcaaggactaccaggagccggcgccggcgccgctggttgacccgacggagtttacgtcatggtcgttttacagagcagggatagcagagtttgtggccacttttctgtttctctacatcaccgtcttaa

SEQ ID NO: 87251 - DNA, 254 bp, Glycine max
  Clone ID: 700909953H1
caaaaaaaccctctctttctctctcttccaaaacctaattttcattttttctcttcaaacaaattttcaaaatgcgtgagatccttcacatccagggtggccaatgcggcaaccagatcggcgccaagttctgggaggtggtttgcgcagacacgggatcgaccccactggaaggtacggttgggactcagagcttcagctcgagaggatcaatgtctactacaacgaagccatctacggccggttcgtgccgc

SEQ ID NO: 87252 - DNA, 252 bp, Glycine max
  Clone ID: 700909954H1
gagagaaacaaagcagcacccatttggatcctctcttctcttctttgatctccgttaccctttttgttttctcaacagagagagagagagagaatctttcgaagttcgtttgcgtgtgttgtgtggtcagtcaccgatggcagcaccacctgcgagggcacgtgccgattacgattacctcatcaagcttcttcttattggcgatacggtgtgggaaagagttgtctgcttttgcgattttctgatggttcc

SEQ ID NO: 87253 - DNA, 203 bp, Glycine max
  Clone ID: 700909956H1
ctaaaatatataggccctaatatgatttagcgtaagtgctgttttttgtcactagtacaatatgctatattgatgatcgatttttgaaatttttgcgatattggtctcattttgtaaaatatagtgatcttaatctatctgttaatttgtcacccatcactcaatggagatgttgacatgtacatatggttggtatggttgcg

SEQ ID NO: 87254 - DNA, 151 bp, Glycine max
  Clone ID: 700909957H1
ctttttgtttgtttgcaggagctgtttttgctgtcaaaataggtgagttaattagtatgtgttataatagtttgacattgttattactattgattatatgatggtatgcaccactttgtgtctttcactcttctaataattaagaatgtta

SEQ ID NO: 87255 - DNA, 253 bp, Glycine max
  Clone ID: 700909958H1
tgctatctgcttcctcgtagtacttcattgagagagacatggacactgtactaagtactacgctgctactcatgttttcatgctccatcgtgcatgttcttcgttcactacaagcaagaatgagaagaaaatcaaactacaatcttccaccaggaccctctctgctcaccatcattagaaactctaaacaactctataaaaagccacagcagacaatggccaagcttgccaaaacctatggccccataatgcg

SEQ ID NO: 87256 - DNA, 253 bp, Glycine max
  Clone ID: 700909959H1
ctcttcttctcttgcggctagggttttagcgcagttcttctagatttaaggaagctgggtaaggaaaaggttcacatcagtattgtggtcattggccatgtcgactctgggcaatccactaccactggtcacctgatttacaagcttggaggcattgacaagcgtgttattgagaggtttgagaaggaagctgctgagatgaacaagaggtctttcaagtatgcctgggtgctggacaaacttaaggctgagc

SEQ ID NO: 87257 - DNA, 259 bp, Glycine max
  Clone ID: 700909961H1
aaaaatggttcgaactgtaagagttgagaagaggataaatgagattgttaacaggctaaacaagacaaaagtggaaaggaaacctgatttgaaagctgagcgagaagcagttaatgcagctgagagagctgagagaaaacaacaactgagagaaaaaaaacgtcgggaggaattgggaaggcttgaaaaggagaaacaaacagagcttaggagctacaagggtttgatggttgcagaaaatatgacatccaacaaacaa

SEQ ID NO: 87258 - DNA, 263 bp, Glycine max
  Clone ID: 700909963H1
aaaatttgacttattttgattttttatgattgatactagtgtgagcagttgataagagagatgatgatcaacgtgaaggaatcgaccatggtgcggccggcggaggaggtggcgcggcgggtggtgtggaactccaacgtggacctggtggtccccaatttccacacgcccagcgtctatttctataggtccaatggcgcccccaactttttcgacggcaaggttatgaaggaggcactgaccaaggtgctggtgcccttcta

SEQ ID NO: 87259 - DNA, 262 bp, Glycine max
  Clone ID: 700909964H1
ctagtggcgatcggatccagctacagcatagagatcaaggaaggcaggaaggaagatgttgggtgttataaggcacaagagtattcgccctgccttctccgcaatcagacacttgtcttctgcagctaaagagattactgtcagggaggctctgaactccgcactcgatgaggaaatgtcagctgatcctaaagtgttcttgatgggtgaagaggttggggaatatccaggtgcatacaagatatccaaggggctgctcgac

SEQ ID NO: 87260 - DNA, 259 bp, Glycine max
  Clone ID: 700909966H1
ctcctactgcctccccgccacctccagctccaccggccgcctctccttcggcaccaccaccacttcctacgtcaagtacacccccttctccaccatctcccgcggctcctccttctacggcctcgacatcaccggcatctccgtgggcggcgccaaactcccagtctcctcctccaccttctccaccggcggtgcaatcatcgactccggcaccgtgatcacccgcctcgcccccaccgcctacaccgccctccgctcc

SEQ ID NO: 87261 - DNA, 256 bp, Glycine max
  Clone ID: 700909967H1
gcttattatgggatgagcacaaacctggtgctttattttaagaagcggctacatcagcatagtgctattgcttccaagaatgtctctaattggagtggaacttgctatatcacaccattggttggagcatttttggctgattcctaccttggaagatattggacaattgctgttttttcaataatttatgctattggaatgacactgttgacattgtctgcgtcagttcctggcataaaaccaacatgtcatggac

SEQ ID NO: 87262 - DNA, 254 bp, Glycine max
  Clone ID: 700909969H1
gcgttttctgcgtcatctccgattccccgacaatggccacccaaatgagcaagaagagaaagttcgtagctgatggagtgttcttcgctgaactgaacgaggttctgacaagggagttagccgaggacggatactccggcgtggaagttagggttacgccgatgcgcaccgaaatcatcatcagagccaccagaacccaagccgttctcggtgagaaaggaaggagaatcagggaacttacctcggtggttcag

SEQ ID NO: 87263 - DNA, 255 bp, Glycine max
  Clone ID: 700909970H1
taataatcctgtttaattaactaaaggctagcttcataactcttcccctcaccccaccaaatcaccccctttagtttcctggtattcttcttccacgtaggtttaattttgaggacacaagagttttcaaagcatcattggtggtggattgaaagacttggtgagtgacatcgtacacatgggaagacactcttgttgctacaaacagaagttacggaaaggcctttggtctccagaggaagacgagaagcttct

SEQ ID NO: 87264 - DNA, 250 bp, Glycine max
  Clone ID: 700909971H1
ctgcaaaggattctacccgccgctcgatgggaattgcgcttcaaggcgtctcgtagggctaatccgcctcacgagggtcaccaacggcacgtgcctttggggggccgaggccccctactgctggtcggcaaacggacggcgggcgcacgcgtcgcttctagcccggattctgacttagaggcgttcagtcataatccaacgcacggtagcttcgcgccactggctgttcaaccaagcgcgatgaccaatt

SEQ ID NO: 87265 - DNA, 247 bp, Glycine max
  Clone ID: 700909972H1
gtcagttgctgaggagcgagctggacggaagctgggtggacttagggtcctcaattcttactgggtgaatgaggactctacttataaatactttgaggtgattctggtggatgtggctcatgctgctattagaaatgatcccagaatcaattggctcgccaatccagtgcacaagcacagagagctgcgtgggctcacctctgctgggaaaagcaacaggggtttacgtggcagaggacatctgtac

SEQ ID NO: 87266 - DNA, 252 bp, Glycine max
  Clone ID: 700909973H1
cttttggtttcttctctccttgataacagcatgtgctggaacatgggaagcctcatgagcgttcttctataataaaggaattagcagacaagatagtgcaaatgagtcaacagaagtttgcctccaatgttgtggagaaatgtttgacctttggaggtccttctgaacgccaattactagtgagtcagatgcttggcaccacagatgaaaacgaacctcttcaggcgatgatgaaagatcaatttgcaaatt

SEQ ID NO: 87267 - DNA, 253 bp, Glycine max
  Clone ID: 700909974H1
cactcattgccactgccatggacctcacagagaaaaacattgaacttctcctccttgatctcaaaccacacatcgttttgttcgatttttccacatattggctaccaaacttggctcgtagtgtaggaataaagtctcttcagtactggattattagccctgcaacagtagggtacatggcatccccagctagacaaagagaagatgacatgagaaaaccaccttcagggttccctgattgttccatcaagct

SEQ ID NO: 87268 - DNA, 252 bp, Glycine max
  Clone ID: 700909975H1
gaagattgaagatggtgttcctttgactactttgtctcgcaactcggatgaaaagattgaattatgtcgattttccaaggatggaaccaaaccatttttattttgctctgttcaaaaagcaggtgatacttctgtcactgcggtttatgagattagcacatggaataaaattgggcacaagaggctgattagaaagtctgcttcagtaatgtccattagccatgatgggaaatacctttctctgggcagtaa

SEQ ID NO: 87269 - DNA, 256 bp, Glycine max
  Clone ID: 700909977H1
gctttgtaaggttttcagatgagagtgagcaagtgagggctatgactgagatgcaaggggttctttgctcaacaagacccatgaggattggacccgcctctaataaaacccccaccactcagtcccagcccaaagggtgtcaagaggctctgtcatcccggagcctggaactgatttcagctgaaatggttaccattttagtgcatatccttgcttagcttcatatcagaattctcaacctcaaggttcacagaat

SEQ ID NO: 87270 - DNA, 259 bp, Glycine max
  Clone ID: 700909978H1
ctagtcgtctgaaataaaccagagccttagaggaggagtttctggttggagaatagcagaggagaaaatcaggcctaaatgtacaactcatcaatttgcagttttatgtttagtactaatattttgcagcctaggatggtaattgcgaggctgtcatgcacattgaagactcatcaaaacgtgagaatcggacactgcacaaaggtgcccaggaatgtaaacatggagaaactgcaacatggttatttatttcctgaga

SEQ ID NO: 87271 - DNA, 263 bp, Glycine max
  Clone ID: 700909979H1
catttgtgttgtgtgtgcatatggaaagttactactattctggctggcctctggctcaattcaactctgcaccaattagtgatcaattatctcctttttcagtcccaacaacaacacaacaaacactccctcttgttgctacttcaacttctgaccctgcagctgcagcctctcttcaatttggtgagttcccttcgtggcctgcccccattgcagcagaagatagagctgcaagtgcttccaagagccacagccaagcagag

SEQ ID NO: 87272 - DNA, 260 bp, Glycine max
  Clone ID: 700909981H1
atcgacgaccacaactccgcggaggaccgaacctacaagctcggactgaaccggttcgctgatctcaccaacgatgaatacagggccaagtacttgggaaccaagatcgatcccaaccggaggctcggaaagaccccgagcaaccgctacgcgccacgtgtcggcgacaaattgcctgattccgttgattggaggaaggaaggtgctgttcctcctatcaaagaccaatgaggctgtgggagctgttgggccttctcagc

SEQ ID NO: 87273 - DNA, 256 bp, Glycine max
  Clone ID: 700909985H1
ctcggggagtggaatacttgcacagcttggctcagcaaagcttcattcacagggacttaaagccctcaaacatattgttgggtgatgacatgagagccaaggttgcagattttggtttggataaaaatgcgccagatgggaagtattctgttgagacacgcttggctggaacatttggatatcttgcacctgaatatgcagctacgggaagagtgacgaccaaagtagatgtgtacgcatttggagtagttttgat

SEQ ID NO: 87274 - DNA, 152 bp, Glycine max
  Clone ID: 700909986H1
catgctcctatcaccacccaggtcctacggcacgcaccggataacttcacggagcaagatcatcttcggcagggcgaagtgtggcagttgcaaattttcgggctttgcttgacggtacactgattgctgtcaagagtctggaatctggctca

SEQ ID NO: 87275 - DNA, 201 bp, Glycine max
  Clone ID: 700909987H1
gaccaaggtgctgctacctatgcagttttcttaccccttctcgaaggagatttcagagcagttcttcaggggaatgatcaagacgagattgaaatctgtgtaggaaagtgcgttgtacctgactgtgagacggaatttagatagggtactcattactggtgttatagttgaggggctagggatccgataccttgtctgaag

SEQ ID NO: 87276 - DNA, 247 bp, Glycine max
  Clone ID: 700909988H1
aatgctactatttcaatccaggttcttcggcaagtaacggataatttcagtgagaagaacattttgggtaggggagggtttggggttgtttataaaggggaattgcatgatggaactcaaattgctgtaaagagaatggaatctgttgcaacagggagtaagggattgaatgagttccaagcagagattgcagttcttagtaaagttcggcacaggcatttggtcgcccttttagggtattgcatta

SEQ ID NO: 87277 - DNA, 95 bp, Glycine max
  unsure (1)..(95): unsure at all n locations
  Clone ID: 700909990H1
catgaatttcccaaaaagccctcaacccagaccctcatctccttcctcttcctacattccacacaacatacgattcctctnaatggggatgtgct

SEQ ID NO: 87278 - DNA, 254 bp, Glycine max
  Clone ID: 700909993H1
caaacaaaccagcagatgggaaacgttttattcgatcccttgggaaggagcaacaagagcttgctgaaagagtgatggtaactcgacttcacctttatggtaaatgggtcaagaaatgtaaccatgctgagatatatcaagaaatctctgatgaaaacttggagttaatgagggaacggctcatggagacagtaatatggcccacagatgacacaaacacagaaaagattggttgataattcatctcaaatttt

SEQ ID NO: 87279 - DNA, 261 bp, Glycine max
  Clone ID: 700909994H1
atccaaacgtcattaagattcgcgaggagttcccaccacgtagcaagctagatacacaagcctacggtgatcatacctgtataataacaaaacaacatttggaacctaacttgggtgggctcactgttgagcaggctatccagtgcaagaagctgttcatcttagatcaccatgactatctcattccatatttgaggaaaataaatgcaactaccacaaagacttatgctaccagaaccatatttttcttgaaaagtgatg

SEQ ID NO: 87280 - DNA, 261 bp, Glycine max
  Clone ID: 700909995H1
aattactagagtattcttttaaattttgtctgtgaaaaaaggtcttttttttttatgtatttctaacaaaaattgtctctcttttttaataatctttgaactggccttattgtttcagtatatcaaatgtctgaattgcttgattagctcctggccgccatggttcataaacaaattttgagctttctgtctccctgattacattttggttattccggccagccttatgtcaaatgtaaaggatgccttagtgactagttg

SEQ ID NO: 87281 - DNA, 255 bp, Glycine max
  Clone ID: 700909996H1
ggatgttacaaagaacttccttgttattgttgctgagaatggaaggcttaaaaacatagacaccattgcaaagagatttgcacagttgtcaatggcatataagggagaagtgcaagcgactgtgaccactgttgttcctcttccccctgaagaggaaaaggcattgaaggagactcttcaggaaataataggttctggagcgaaggttcatcttgaacagaagattgatccaagcatacttggtgggcttgtgct

SEQ ID NO: 87282 - DNA, 264 bp, Glycine max
  Clone ID: 700910001H1
gtttcgaccatcccctgttccttttctgttgcttgttcctctcttgtacgcaaacccatcaccacgtttgggtttgtgtaccacattccataacataaccttgttgtcctcaaattccagttgttggatttgtacagaaggtgaaaatgttttggtttagaaaaacaccagcaccaactgaatcagataagaagacaacccttactgcagaaaaaagaactgcttcagaacctgtcctgccagttccaaaatctaaaggaaact

SEQ ID NO: 87283 - DNA, 261 bp, Glycine max
  Clone ID: 700910003H1
ctgcttttcaaacattgctgtatgatccaaatgcaactctggggtcagagtggcaaacttgtgacataaggccatctggtttgtgcttgtgttgtgtaacaatcaaggcatgaaaccttgtcttatctggatcttggagtgatggatacatctatggaattctctgcattttatcaagaatgaagacagcagtgagtgtgagtgttcctcacgatcacatcatactattatctgattataattctgtgctttagcttgttt

SEQ ID NO: 87284 - DNA, 246 bp, Glycine max
  Clone ID: 700910006H1
cagatcccgctgtctagcggaaacaaacaaaggcagaaaatcatttcctccttaaatctgttcctattttcattttcatttcaacttaacgttttcatgggtattcgcttttcgtcctcccaggcggcgccgtcggatcgtcgccggcgtcgagtttgtgcgaattgcccgagagtcgtgtcgctcagatcatgacctacatggatccgccccagatttgcaagctcgtaaccctcaatcgggctt

SEQ ID NO: 87285 - DNA, 266 bp, Glycine max
  Clone ID: 700910008H1
ccctcaccaaagaagaaccaaaacaatggcggatcaactcaccgatgaacagatctccgagttcaaggaagccttcagcttgttcgataaggacggcgatggttgcatcacaaccaaggagcttggaactgttatgcttcattgggagcaaaacccaactgaggcagaactccaggacatgatcaatgaagtggatgctgatgggaatggtaccattgacttccctgagttcctaaacctcatggctaggacgatgaaggacactg

SEQ ID NO: 87286 - DNA, 264 bp, Glycine max
  Clone ID: 700910010H1
caagggaaatctcaaagtgtctgattttggattaagtgcattgcaaaaggtagcattgttcctttgaaccttatcctcagttccatcataagtattctcttactgagtcaaatttggatacgttatcagcataacgagtcttaaacacgcggtgtggatccccaggctatgtggcacctgagctgctattgagcaaggggtatgatggagcagctgctgatgtttggtcatgtggggtgatcctttttgaattacttgcaggct

SEQ ID NO: 87287 - DNA, 268 bp, Glycine max
  Clone ID: 700910011H1
attccacaatactagcaccctcaccatgaaactcttccactacctcttctcactactcacactactcttcctctagcaagccaaagaaggagtttccattagccctttgcaattgatcacacacccacttgacccctaacaaagcaagaaatcaccctcgtccaagccacagtcctaaagagataccccacaccacccaaccatgtcttcttccactacgtcggcctcgtagatcccgacaagacccacgtcctaaagtgggcctcct

SEQ ID NO: 87288 - DNA, 268 bp, Glycine max
  Clone ID: 700910013H1
cgtgtttacccaaggccaagggaacagagagcaacaattctacctctggttcgaccccaccagaaacttccacacttactccatcatctggaagccccaacacatgcatattcttggtggataacattcccataagggcttcaagaatggtgagactattggcgttcctttcccaaagaagcaacccatgagaatctattctagcctgtggaacgctgatgactgggccaccagaggtggtttcgtgaaaactgattggtccaatgca

SEQ ID NO: 87289 - DNA, 263 bp, Glycine max
  Clone ID: 700910017H1
cacaaacgcacactgaattcaaaaacatcgaaagagagaggcatggccgagcaaaccttcatcatgatcaagccagatggcgttcaaagaggccttattggcgagattattagcagatttgagaggaagggtttcacttgaaagggttgaaactcgttactgtggaccgtccttttgctgagaagcactatgctgatttgtctgcaaagcctttctttagtggtttggtggattacattgtctctggccctgttgttgccatg

SEQ ID NO: 87290 - DNA, 263 bp, Glycine max
  unsure (1)..(263): unsure at all n locations
  Clone ID: 700910018H1
agcatacttagaaacagcaactatgtctctcatgcagcttactagctcccctgttggctcactggtccgtttcattgtaatatttgctttatggtacagaaccatggctttggccaagttgccaccaaacgcttatcagttccagcagttttagcgtttggagattccatcgtggacccaggcaacaacaacaacataaaaacattgatcaagtgcaacttcccaccttatgganaggattttcagggaggaaacccaacggt

SEQ ID NO: 87291 - DNA, 221 bp, Glycine max
  Clone ID: 700910019H1
gaggcatgccaagtgggtcgaattgcttgagcaattcccctatgtgatcaggcacaaaaaaggtttgcctcggcctaagggaggaaaggactcgatttttgtggtggttgagaggttatctaagatggcttactcatagcctataagaagataagtttgggcaggttaaagcagaatatgtcaagaagttgcatgagaaaaccaaggcccaaattgagaag

SEQ ID NO: 87292 - DNA, 261 bp, Glycine max
  Clone ID: 700910020H1
ctagtggcgatcggatccagctacagcatagagatcaaggaaggaaggaaggaagatgttgggtgttataaggcacaagagtattcgccctgccttctccgcaatcagacacttgtcttctgcagctaaagagtactgtcagggaggctctgaactccgcactcgatgaggaaatgtcagctgatcctaaagtgttcttgatgggtgaagaggttggggaatatcagggtgcatacaagatatccaaggggctgctcgaca

SEQ ID NO: 87293 - DNA, 263 bp, Glycine max
  Clone ID: 700910021H1
gtttctgtctctgtgtttgcggctgaggattccgaacgagcgaccttcttcgtttctcgcaaagtttaagtcatcatgggtaaggaaaagactcacatcaacattgtcgtcattggacatgtcgactctgggaatcaactaccactggtcatttgatctacaagcttggaggtattgacaagcgtgtgattgagaggttcgagaaggaggctgctgagatgaacaagaggtcattcaagtatgcctgggtgcttgacaagctc

SEQ ID NO: 87294 - DNA, 267 bp, Glycine max
  Clone ID: 700910022H1
tctcgagccgattcggctcgagggtctccaccgtgcacgccatgtacggttctcagggactctgagccaccctccgccggaagcgtttcatcccgaatacgacaccgttttgcaggggctgttgtcgtttaacaatgcacgggctcgccctttaccattaacccttacccttactttgcctacagaagcgaccctggcagagctgataaccttgctttttgccttttccagcctaacgctggcagagttgactccaacaccaacctc

SEQ ID NO: 87295 - DNA, 264 bp, Glycine max
  Clone ID: 700910024H1
ggcaaatctcataggtccaagaatatctgttgcatgctttttcagcgaaggtcttaaatcatcaccaaaaccctatggacctataaaagaattattgacagaagacaatcctcccaaatacagagaaaccacagttcggagtatgtacggtatttcgaagctaaaggtcttgatggaacctctgcacttcaacacttcaagatttgagttgaattggtgtgtggtttatttagcacaataaatgaatagattagataagttgga

SEQ ID NO: 87296 - DNA, 269 bp, Glycine max
  Clone ID: 700910025H1
gattataaattttataaatacaaatagacctaggaaaaacatgcctggacatcttctcccacctcatatgcattctatgccacaatcacgcttccaagttactcaagtgcagtctcatgaaaatcaaatgaaccctcatgcaaacaacaaatatgctaggctctgtagcaacaatgcagcagaataatatggcaggcatgcagcataattctctgtctggtgtatctacagtacaacagagtaagatgaattcaatgcaaccaagtacc

SEQ ID NO: 87297 - DNA, 264 bp, Glycine max
  Clone ID: 700910027H1
ggattttcctcatggtttcttaccctttcaaaattcagggaaatttgtgagtggcactctcaattgggctgcaaatcattctattggcccaagttccttctgggttattgtttccttggatctgcataaggaaacattagggaagttctgccacctgattatgaaaaggaggactgctccacccctagtttgggtgttttacaaggatgcctttgcatgaattatgattacaagaaaacccattttgttgtgtggatgatgaag

SEQ ID NO: 87298 - DNA, 259 bp, Glycine max
  Clone ID: 700910029H1
cacctcctcaacctctgcagcgccttcgatccagaaaacatgactaagagaacaaagaaggctggcattgttggaaaatacggtacccgttatggcgccagtctgcgtaagcagattaagaagatggaagttagtcacacagcaagtttttctgtgaattttgtggaaagtatgctgtgaagaggaaagctgtgggaatatggggatgcaaggactgtggtaaagtgaaagctggcggtgcttacactttgaataccgc

SEQ ID NO: 87299 - DNA, 263 bp, Glycine max
  Clone ID: 700910030H1
gcttcaaattctgaggcttttggtggcagcccgcttgttagtattatttttttttttccttttgaattttcaattttgtctgtattctttccttggatattgcttaagaaaaatccttattacccatcttttattttctacacatggggacggacaccgtatattgatatgagaatcaatctagtgactattgttctggttggccttgcatacatatgttcggataataatcattaatgataaatgatacctccagtttcgat

SEQ ID NO: 87300 - DNA, 261 bp, Glycine max
  Clone ID: 700910031H1
ggatttactgggtaaaatatttactgacccaaaaatacttgagcagttgattaatgaacatggaactgcagctaccacagcaagtgcttcctcaaatactgtggatatacccacttctgggttgaagcctgctatccatcagttctggtgtctacacctacacctgatgtgacagcttcatggactacacccacaagtgcagtgggttcattaccttctgggtttgggttgaagccttcaaatccatcagtttctttattg

SEQ ID NO: 87301 - DNA, 261 bp, Glycine max
  Clone ID: 700910035H1
accgaatgagagcatcaaactcttcttcttcgatttccattgcgaacgttactttttcttcttctttctcttcattttcttcgctcttcgatcttcgtccggggactgctccgaataccaccaccacgactgccgatggccacgatcggaggcttacacgactcccaaggctctcaaaacagcgtcgaaaccgaagccctcgctcgattcgccgtagacgaacacaacaagaagcagaattcgcttctggagtttgctagg

SEQ ID NO: 87302 - DNA, 258 bp, Glycine max
  Clone ID: 700910036H1
ttcgcattgccttcgcttctcttacatacgtggcggtgggatcacagtccacatggcctgccatatatgctacagtgatgggaagcttgatactgctctctgcgattggctcgatgtgccattgtgtcattttcacacgctcgtggagactacactgagacccgagagtctatcgttcgccatgtctcatgcatcagtccatgcgattttgaagagtgcatacaacagagtgtgcgcgctgcagtctgtagtgtagtt

SEQ ID NO: 87303 - DNA, 276 bp, Glycine max
  Clone ID: 700909332H1
agacgacaacggcaacgtcaaactcgactgccccgccattggcaaacagttcgctgccgaggaaatttctgcccaggttctgaggaagcttgttgatgatgcttccaagtttttgaacgataaggttaccaaggccgttgttacgggcctgcttacttcaatgactcccaaaggactgccaccaaggatgctggtcggattgctggtctagaggttcttcgtattatcaatgaaccaaccgctgcatccttagcctatggctttgaaaagaaaaac

SEQ ID NO: 87304 - DNA, 123 bp, Glycine max
  Clone ID: 700909333H1
ctgcaggccaatggatggttgagcaaattgccggtgtgaatgaggctacaggtctaatatactgtactgggaccttagatggtcctctggagtccaatttgtattgttccacacttcatgctg

SEQ ID NO: 87305 - DNA, 270 bp, Glycine max
  Clone ID: 700909334H1
ctcgaatgctgcattgcagtttcctgtgatgcccacatgcaaagctaccatggatttgtctgctactgcaacatctgcctcacccgtctttgttgctgctccagcagagaaaggccattttcttttagactttctcatggaggtgtttcagcagctgtctccaaaactgctgctgctcccattgaacgtgttaagcttttgatccagaaccaggatgagatgatcaaaactggtaggctttctgagccctacaaaggtattggtgattgt

SEQ ID NO: 87306 - DNA, 268 bp, Glycine max
  Clone ID: 700909335H1
gccattaccacctcttcactctttctctctcttcccaaactaaacataaacatacattacacatttctagggttctctcacacaccaagattctcctagctgcagctgaaggactgtgaagatgttggagaaagttgaaaatttaacacggagaggatgatggaggaatttgagagggtgacaaaggatgctgagaggattcaaagggaaaccctgaagaggattttggaagataatgcttctgctgagtacttgctgaatttgggct

SEQ ID NO: 87307 - DNA, 268 bp, Glycine max
  Clone ID: 700909336H1
gttatcaacttggagcacatcaaggccatcatcaccgcccaagagctcctcctcctcaactctcgcgacccctccgtcacccccttccttcatgagctccaggcaaggatcatccgccaccacaaccaggctgatgctgccccaaccccaaccccaacgacgccatcaagattcttcccttcgagttcgtttccctcgaggcctgtctggaggctgcttgtagcgtcttggaaaacgaggctaaaaccttggagcaggaggctcatcc

SEQ ID NO: 87308 - DNA, 274 bp, Glycine max
  Clone ID: 700909338H1
gatccggctcgacatcgctactcctctctcccaagaaagaatcatcactggcgattcaacacgacgacgatctcaaagacgagaagaaaccgcgacctctcgacgaagatgacatcgccctcctcaagacctacggtttcggaccttactcccaagcataaaacaggctaagaaggaaatcaaagatatggccaagaaagtgaatgacttatgtggtataaaggagtctgatactggtttagctgcaccaagccagtgggatcttgtttctgat

SEQ ID NO: 87309 - DNA, 271 bp, Glycine max
  Clone ID: 700909340H1
aaagagcgacgcgacgcctattttgtttcagacaaagttttgttgcaaagcaaaaactactacgaggagctttcctccatacgaatcaaaggaggagagagagagagagagagagaggagacacagacacaaaggaaacgaaaaagcaacacacaaaaaaaaagaggtctgtgcctcctcttatatgtaatagctagtttccgagacaagaaaaaaaataagagtaaaaagagaacatggattatgaaaacaacagttggatttgggaggg

SEQ ID NO: 87310 - DNA, 129 bp, Glycine max
  Clone ID: 700909341H1
tttctcacttctcagcactcagcagcgatatcagttgaagaaacagaaacaaacaaaagaggcagaagatgttgtgggtggacaaatatcgtcccaaaaccctcgaccaggttatggtccacacaacat

SEQ ID NO: 87311 - DNA, 268 bp, Glycine max
  unsure (1)..(268): unsure at all n locations
  Clone ID: 700909342H1
ccttggagtgcaatttcctggatcaactcttccaaaccatggctaatcatctactggtgaaggattcttccttggttgtgatgtgcatggttttgggtatgcccttggcggatgcagctctttcatgtccttaagtgcaatcattgtagcaccatgccttggtgactagagaggccttggtggtggagttttccctctaccatgttgcaatggggttaggacctanacaactaggccagaccaccccagatcgtcaaggggcttgtag

SEQ ID NO: 87312 - DNA, 271 bp, Glycine max
  Clone ID: 700909343H1
ctcgagcgaatcggctcgaggaaaaattagccccggaaaaccgtcacagcttcgagtcacaacggtcaaaaggagttcgagtgggatcaaacccttgacgaggtcaatatttacatagctcttcctcctaacgttcattccagcaattctactgtaagattcagtccaagcacctcgaacttggcatcaaaggcaaccctccgtatctcaaccatgatcttactagcccggtgaagacagattcttctttttggaccttagaggatgacat

SEQ ID NO: 87313 - DNA, 178 bp, Glycine max
  Clone ID: 700909344H1
catcgcaccaacgatcccatgtcccaagacttctctacgagaagatcacagtgtcacatagggctaggcaaaatgtccgagggtaatgccaagaggggacactgcatcgccagcattggcgtctcaaccttattgtaggtgctatggtcgtggcgatcacaattaggtcggtccgcat

SEQ ID NO: 87314 - DNA, 273 bp, Glycine max
  Clone ID: 700909345H1
aatcaaactcattctgtcttttcttctatttttatttctatccaatcatccatggccgaggaaccccaaaaaccagcctccgctgaagaagtggtcgctgttcctgcggagaacccaccatctgaagccgaagctgaaaactcgaagcagagaaggcccagagtggtgtagaagacaagatttcccagtcggtttcgttcaaggaggagaccaacgtggttggcgacctccccgaggcgcagaagaaagcccttgatgagctcaagaagcttg

SEQ ID NO: 87315 - DNA, 238 bp, Glycine max
  Clone ID: 700909346H1
actaaaacaaatgtatcctctcttgtgctggtgaaaatcatgtacatacatttcaggactatttagtaatagatgatggatttttgctctggtatgttgttttccttcctgtaccatctatttccatttcaatggtttgttcctatccttttagctgccccattaaattgggggctatcaagacttgttcctttttctcctacatttaatctttacacaaggaatgctcctgaaaatt

SEQ ID NO: 87316 - DNA, 270 bp, Glycine max
  Clone ID: 700909348H1
ggatctagctgactacatacgtgctgattctgaagttcttcaccaagacagtgtagattctccagattcagattatcaaatggcttctggacaggcacatcgatcagataatgaatctgtggaggaaggagcactgcccaattagaatcaagatttgataatgcaaatatgtctacgtcagtccaagatgcagatgaaatgtttgattctgcggcttctgatgcccaccatatttcttctaatggttccctatggctgcccacggattta

SEQ ID NO: 87317 - DNA, 270 bp, Glycine max
  Clone ID: 700909349H1
gacatgttcccacaaaccctaatattgttctcagcactcataatcctcttccatggagatctcgtcttaagcacaacagcaccagatgatatccacgatgttctccctcagtacggtttcccaaagggtcttcttcccacaacgcggtctcctacaccctctcccccgacgatggcttcttcaccgtccagctcgatgccccctgctacgtccactgggacgaccaattagtctactaccacagccaaatcagtggcactctcacctacg

SEQ ID NO: 87318 - DNA, 265 bp, Glycine max
  Clone ID: 700909350H1
aatctccatactgtctgatgctggtcttggaatggctatgttcagcttgggtctgttcatggctcttcaacctaagataattgcatgtgggaactctgttgcaacatttgccatggctgttcggttcctcacaggtccgccgtcatggcagcagcttccatcgctgttggcctacgtggcaccctcttgcgtatagctattgttcaggctgcactaccacaagggattgttccatttgtgtttgccaaggagtacaacgtccatc

SEQ ID NO: 87319 - DNA, 259 bp, Glycine max
  Clone ID: 700909351H1
ctctgaatccaattcattcttcttcttgttctttgttaggcaatacaacatttattacgcatactcaaagtagcttcgaagttcgtatttttattggcatatcatggagaataataatcagtcgttttggcaattcgtgaccagctgaggttacaggcatctaatttggcgaacctttctctaaacgattcgatttggagcaacagttacatctccaagaggcgtgatgaaaggattaattttgacatcaaagttgggg

SEQ ID NO: 87320 - DNA, 262 bp, Glycine max
  Clone ID: 700909353H1
ctctctctctctctctctcttttctctgtgtgtgtgcgtggattggtgaatttgagattgaagaagatgatgcaggctggacccggcggcatggcccaacaagcgaaccagcaatacgcacagcaacagcaacaacacaacaacaagcctacatgatgatgccgccgcagcctcagccccctcagatgtgggccccatcggcccagcctccgtcccaatcggtagctcctccgcaacccaccagcgccgatgaggtccgtac

SEQ ID NO: 87321 - DNA, 268 bp, Glycine max
  Clone ID: 700909354H1
aaaacgagaagagagagagaaagacaaatagaagaagctgcatttgcagagacgccctgagagagagaattggaaggttgcgacgagtgatgatatacacatattgtgacggtagtgaaatcgaggaaaaagaggtacaatttgcgagttgcaatgagtaacgaaaaggctccttcatcagcttcttcgagtagctacgagttgagcaaaggcatcaatggcctcgacaaggttattcttcgcgacgcacgtggtagctccgctgagg

SEQ ID NO: 87322 - DNA, 265 bp, Glycine max
  Clone ID: 700909355H1
ctcgagcgaatcggctcagaaccgaacaacattctctgagtttatggtttagcaatatcttattcagaatttgctttctttatcagtttgagatcaacattagattcttatggcttcagagtctggaaaggacgggccggcgtcccaaggaagcttaaatttaaaccaagagctccacctcgtcgagtgataaagcaagaagttaaagctgaagtggctgatgatgttgatgtcgatgctgatgcagaacatgctgctaaggaga

SEQ ID NO: 87323 - DNA, 268 bp, Glycine max
  Clone ID: 700909356H1
ccacatcactctttctttcaaatctagggtttcctccttctgcaaccatcaatgtccgcaatcgcggctccccaacacagatcctcggagacagagtcctacgtggacaataagcgcaaggaggatatccgccatgcaacatcgtggccgcacgctcagtcgccaacgcggttcgcaccagtctgggccctaagggcatggacaagatgatctccacctcctccgacgagatcatcatcaccaacgacggcgccaccatcctcaacaa

SEQ ID NO: 87324 - DNA, 279 bp, Glycine max
  Clone ID: 700909364H1
agacgacaacggcaacgtcaaactcgactgccccgccattggcaaacagttcgctgccgaggaaatttctgcccaggttctgaggaagcttgttgatgatgcttccaagtttttgaacgataaggttaccaaggccgttgtcacgggcatgcttacttcaatgactcccagaggactggtatcaaggatgctggtcggattgctggtctagaggttcttcgtattatcaatgaaccaaccgctgcatccttagcctatggctttgaaaagaagaacaac

SEQ ID NO: 87325 - DNA, 112 bp, Glycine max
  Clone ID: 700909365H1
aatgagctgagtgtaacacttgattaccataagctaagtgttgttcatgtgctacactcagctcatgaacaacacttagcttatggtaatcaagttctacaattcggagaac

SEQ ID NO: 87326 - DNA, 263 bp, Glycine max
  Clone ID: 700909366H1
caaccttattcaatgactggttttggttctttaacggaaaacctgttggtttgatctccaagaaatcttctatctcatgtaaatcaacaggagcaaataatactttctaaagagctctctgggctacaaccagaacagctcgccatgctcggcgtcgccaaggaccttggcgacgccgtcggcttcatgacgggcctgctctgcgagattttgcccatctggggcgcgcttctcgtcggcgctgctttgaacgtcgtgggata

SEQ ID NO: 87327 - DNA, 264 bp, Glycine max
  Clone ID: 700909368H1
tgcagtcttacccgcataagatactcaccggtaggagggacaagatgcataccatgaggcagacaaatggcttgtctggcttcaccaaacgttccgagagtgaatttgattgttttggcactggtcacagctccacactatttcagccagacttggaatggctgttgggagagatctgaagggaagaaagaataacgtggttgctgttataggtgatggtgccatgacagcaggccaagcttatgaagccatgaacaatgctgg

SEQ ID NO: 87328 - DNA, 262 bp, Glycine max
  Clone ID: 700909369H1
atatccccccctagctacagagcagccaaaggggaggaataataataagcctatattctaaggccggaaaaataaaaaaggaataacaaaaatgtctggaaaggtaattatctcggctgtttctctcatcctggtgttggagtggccataggtgtggtggtggccgtcaacaagaagggcgaggatcccacacttcaatctcaacaaaaatcagtaggggttatctgccaaaacactgatgaccagaagctctgccacgaaa

SEQ ID NO: 87329 - DNA, 261 bp, Glycine max
  unsure (1)..(261): unsure at all n locations
  Clone ID: 700909370H1
tncgagcgaatcggctcaccctctttctctttctctgcacaacctgcacactctgcactcgatcaaacagaaactggcaaagaatgtggggatccttgccattgacatctacttccctcccgcttgcgttcagaggaagcattggagactcatgatggtgccagtaaagggaagtataccattggtcttggacaagattgcatgtcattctgtaccgaagtagaagatgtcatctcaatgagtttgacagtggttacttct

SEQ ID NO: 87330 - DNA, 264 bp, Glycine max
  Clone ID: 700909371H1
accaaaaccagcaccacccccctctctatctcttttctcccttgttgccgttgaacttccttaacctaaaaatgtccaattctatctccgacccgacccgaataattcactctcctactccgaataccaccgcggccctcaggttccgcttcggaacctttcccaggttcggaacagaatggattctctacaacacttcctatctcaatccatcaataccaacactctcctcaccgtcgatcaaatcgccatggtctccagcca

SEQ ID NO: 87331 - DNA, 264 bp, Glycine max
  Clone ID: 700909374H1
ctccaacagaatgttggctatcttctgctttgtgttgtttgacatgcagtgattaagcatgcttggtttctccttatagcaattttaatgtgtatattgttcttcaacagtctatcctctacaacaaccatagaaagagaatgtttaaatggagatggctttggaacttggggatagtaaaattaagtggaatttcccccttttcttacatatgaggttcaaagcaatactttgtttagaagagagatttctgcaccacttaca

SEQ ID NO: 87332 - DNA, 204 bp, Glycine max
  Clone ID: 700909375H1
ggcgactatgtgtaaggagaggttacacgaaatagtgaaggaagagattcacaaagcgaaggagaatttggaatgggaatcaacgatgaagaagtgtttcgcgcgcatggacgaagaggttctcaggtggagccaaacaacgagactccaaattgcaggtgcgagcttcaaaccccggaatgcgacgccgtaggctccatcgct

SEQ ID NO: 87333 - DNA, 221 bp, Glycine max
  Clone ID: 700909376H1
aaattggcggcggcggtggcggcggcatagagtggaagtagtaaggatcaatggcagttccagggaggcgcaacggcatgaacgacgacgaagaggaattagacgacaacgcccttttcgaagaacaaggtgccgcgaagacgacgccgatacccctcctcacctccgcgacctctccgccgccgctcagctaggcgacggccaggccctccgtatcgctc

SEQ ID NO: 87334 - DNA, 252 bp, Glycine max
  Clone ID: 700909377H1
aaaagggttcgtgcgttcttcctccaaagcctttcatggagttcacggcactctctaacgcttcccaacttgggagcatcaaccctcgcagaaccaaccttcaaagtttaacacaaaccctcttgctttttcttagtttctttcccttcttcctctcgcagaggttgctcttgcatagccattctcaacacccacacgcccacctctagcctgtggacctccttccgctgattttgaactctctgttttgac

SEQ ID NO: 87335 - DNA, 268 bp, Glycine max
  Clone ID: 700909379H1
ctgaaccaaatcatcacacacacatactactcagcaacaattcttctacaatggatctcctcactctggaaaagaccctcataggtctcttcctcgctgcggtggtcgccatcgccgtctccaccctccgcggccgcaattcaagctcccaccgggcccactccccgtcccaatcttcggcaactggctccaagtcggcgacgacctcaaccaccgcaacctcaccgatttggccaaaaaattcggtgacatcttcctcctccgcatg

SEQ ID NO: 87336 - DNA, 269 bp, Glycine max
  Clone ID: 700909380H1
aaaacagcatcgaacccgtcgtagcagaaaaacttgtcaccatggtttcttccgacaaggatccacgagaggatgtccttcaagcctggtacatggatgatagtgatgaagatcaaagactcccccaccacaaagaaccaaggagtttgtctcgttggaccaacttgctgaacttggagtccttagctggaaactagatgctgataaccatgaaaatgatccagagctgaagaagattcgtgaagagcgtggttacacctacatggatg

SEQ ID NO: 87337 - DNA, 213 bp, Glycine max
  Clone ID: 700909381H1
ggagttcggcttgagggtatgtgggaacttttaccacacatgcatacatcgcgtagattgtgttctggtttttttatggatggcaaattctacgtgattggtggaatgtcgagttcagctgtttcattaagttgtggagaggagtagatctcaagacaaagagttggcggataatagaggggatgtatccatatgttaacgtgggtgttcagg

SEQ ID NO: 87338 - DNA, 259 bp, Glycine max
  Clone ID: 700909382H1
ggaataattaccactagagtccctttgatctgctttcattcctgaccaaggtattgcaacagtaacacctttagagaaaaagtactcacaggagcgttcagatttcgtctgtttcgaagaagcatttccatgtcatcaaagttccaaatatatacatgggagtcctctccaactgagattatattttttccacttgatgtaaatgaaccagacatctgacttcctgacttaggaagacctttgtatttctgaacaagct

SEQ ID NO: 87339 - DNA, 255 bp, Glycine max
  Clone ID: 700909384H1
gtgaaacggtgggagagaagcagcctcaacctgaatctaaggtactgcaatctcttatggtttctattggttcaaaaacattggtgtcaagaagctcaatgggcgagcacgactatgaacccctcaaacaggcaaaactaagaggaggaagcataagaaaggaggatccactcatgcattcgattccaactccttcacttctccgcctcaactatcccgtgttaggaaacagcttgaccctgaaacaaccaatac

SEQ ID NO: 87340 - DNA, 228 bp, Glycine max
  Clone ID: 700909385H1
ccctgcagacccctctgaccctctccttgtggattggatcaaataccctggaaaccccgttttggtgccaccaccaggcattggtactaaggactttcgcgacccgacaaccgcgtggctcacctccgaaagaagttgcgaatcaccataggatccaagctcaacaaaacaggcaatgcaatgggttaatgaaactgagacttcaagagctatgagctccaggagggt

SEQ ID NO: 87341 - DNA, 176 bp, Glycine max
  Clone ID: 700909387H1
acaaatttcttcacagttctctgaggctttacgattgaactcttttgaaccacatggtgaacataaggagcagaattctgtgccattatctaataatgaaccagatgtccaagttttattggctggggaagaacttctgctgtgaatgcatcatctgtcatcagccattcagttaa

SEQ ID NO: 87342 - DNA, 258 bp, Glycine max
  Clone ID: 700909388H1
cttcctcaacacacacaaaatatctcttccaatttcaatttctcgtcgtccctcatcatggctcgtctcgcgatcgctgtcgccgccgtgctcctcgtggccctctccgcctccaccgcgacggcgcgtcctgcaggaccttcataatctcctcctactcgttccgcaaccctaactccaacaccttcgccaccatcaccgagatccgatctttcacccctctctacatcaccgacaaacccaccggcaaaccctcct

SEQ ID NO: 87343 - DNA, 248 bp, Glycine max
  Clone ID: 700909390H1
gaaaaaaatgaccaagatcttctttgtattgctgttatgtctgatcatagcagcttcttctgggtttgtgaattgctttgatgttgaaaagaaggaaaagattggaatatttgagctcaataaaggtgcctttctttgaaggtcaccaactggggtgcttcaattttgtccctggtgattcctgataagaatggaagttgagtgatgtcgtcttggatatgatctgttaggatacactatgatacaca

SEQ ID NO: 87344 - DNA, 256 bp, Glycine max
  Clone ID: 700909391H1
cggtattcgatggcggcgagctgagaagggaagtggagaaaagtggaattgacccaaaattcattccaaagatatggaagcatatcctcatctctgccaaagatgaagattgggattgggagaaacaagtccctccttgccctcttcggcctactctctccttcgttccaacttcaaaacccctctctcttcctctattcactccgttttccactctgccgacaacctcaccaccaagctcctcatccagctccac

SEQ ID NO: 87345 - DNA, 233 bp, Glycine max
  Clone ID: 700909392H1
ctggtttgtctctagatggaagccttgttagtgaaattgaaggtgaaagcgcagtcgacaggctaaaaagacaagttgaccatgacaggaaacttatgaatgctttgtataaagagctggaggaagaaaaaatgcttctgcagttgctgcaaatcaagcattagccatgatcacaaggctgcaggaagaaaaggcaacattacatatggaagccttgcaatacttaagaatga

SEQ ID NO: 87346 - DNA, 227 bp, Glycine max
  Clone ID: 700909393H1
gcttcctctgtttgctcgcacacgtcgtttttttctttttgttgcttcggagccaactcaacaacaacgccgtgcctaatccttaagaataacgaattacaacaaccaaccatgttgcattgtctcaacattcctgttcggacatcacagtcttggaaagacaacgggaagcaaccatcaagtgccagaaccaccaaccaccctacttaacggactttaacgccgtc

SEQ ID NO: 87347 - DNA, 246 bp, Glycine max
  Clone ID: 700909394H1
ggagattattccaacttccatatccactctcatctactacatatatgccacacactctcatagtactcgtttatctaatatctctctcatattatccattctgcggatattcagctaagtacaatacgtactaagatgactgagggaaagctagttgaagctgcagaagctcataagacacttcaggatttcgatcctccaaagaagcgcgagaggaacaagtatgcttatgcttgtgctatgctg

SEQ ID NO: 87348 - DNA, 262 bp, Glycine max
  Clone ID: 700909395H1
tgcaggtaagctaagaagggtagaagactatctctttctttcgctctatttaaggaacacaaattttacaggtgtagtaacctgtttcacaacccaatacatgtcatgcacatgttcaaccaaaatccggaaagaccaaactgcatttacattttgctgctgctaattaattcaattactggctatgggacttcattcgccgactcctcctaattaactcatcgcacttctttcatcaactcatatttcacttacaaaacac

SEQ ID NO: 87349 - DNA, 260 bp, Glycine max
  Clone ID: 700909396H1
cggctcgaggttttattatgatgtgccctcaattgttcatcaactacaagctcaaatctgttgctcatctaccttggaggcaaatgacttacaagtttctcaacaccataattgatgacctttttgccttttcattaaaatgccaacactccatcggctttctgtcttccgtgatgatcttatctttgtcatatacttataccagaggtggatttataaagtggacaagaaacgtgttaacgaatttggttttggaggtg

SEQ ID NO: 87350 - DNA, 277 bp, Glycine max
  Clone ID: 700909403H1
tagtgacactgtttggtagcattcatgagaagctccccgagacaggagcaggaggaagcatgcgaacactctgtttccaaattttggaagcatgttcagcacagctgagccgcatgttaaacatgaacagtgggatgaagagagcttacaaagggaaggtgaggactacatgtcagatgcagctgatggggactctgatgataatttgcatagtcctttaatctcacgtcaaacaacaagccttgaaaaagacttgcctccccctccttcccatggc

SEQ ID NO: 87351 - DNA, 280 bp, Glycine max
  Clone ID: 700909406H1
aacacacccaaacagagccttattcttgagaaacaagtttcttcttcaaaacaacatgtctggaaccgtgattgtttttgactttgacaagaccattgtcgatgtcgacagtgacaactgggtcatcgacgaattgggtttcaccgatttgttcaaccagcttcttcccaccatgccttggcactctctcatggacaggatgatgatggagcttcattcaaaaggtaagaccatagaggacattgaagaggttctgcataggattcctttgcacccaaga

SEQ ID NO: 87352 - DNA, 280 bp, Glycine max
  Clone ID: 700909407H1
aacacacattgttaaaagtttctttatttcaagtgaagttagttagttatatttatatacacaatcatgtcaatgagatcaattggtacaagccttagccttatggtatggcttgtaattgcaaagtcagcattagcaaaatctgataaccccccagtcctagacacacaaggcaaccctcttgagcctggcaaagattactacatcaaacctgccataaccgacgttggaggccgcgtcactttgttaagcagaaacaatccatgccctctatatgtag

SEQ ID NO: 87353 - DNA, 97 bp, Glycine max
  Clone ID: 700909411H1
ccaatctctagcaatgtaaggatagcgtgctgtctaaaatctgcgcacacttgagttatcatcagtcccaatggagtaaagtttatttggtcagtcc

SEQ ID NO: 87354 - DNA, 280 bp, Glycine max
  Clone ID: 700909412H1
aaagccttagccttccctacaactccaaacagaaagacatcgacatccatggctgcctccgtctccactgtcggagctgtcaacagagctcttttgaacctgaatggttctggagctggagcttcagctcccagttcagccttctttgggaccagcttgaagaaggttattgcctcaagggtcaccaacagcaaggtttccggtggaagcttcaagattgttgctgtagaagagaagaaagagattgaagagacccagcagaccgacaaggacagatggt

SEQ ID NO: 87355 - DNA, 277 bp, Glycine max
  Clone ID: 700909413H1
gaagaatgttctgctggagttttatgctccctggtgtggtcattgcaaacagttggctccaatattggacgaagttgctaggtcatatcaaagtgatgctgatgttgttattgcaaaactggatgcaactgccaacgatatcccaagtgaaacctttgatgtccaaggttatccaaccgtgtacttcaggtcatcaagtggaaagtgctcacaatacgaagggggtaggaccaaggaagacatcatagaattcatcgaaaagaaccgggacaaacct

SEQ ID NO: 87356 - DNA, 281 bp, Glycine max
  Clone ID: 700909415H1
ctccaccgtccattgcaaagtcttgcgcccaatttccatggaactgtaaagacaggatagttagaagattaaatcttaaagcagtaagtcatcatggataaatcagagcagactcaacagcagcagcagcaacaacagcatgtgatgggagttgccgcaggggctagccaaatggcctattcttctcactacccgactgcttccatggtggcttctggcacgcccgctgtaactgctccttccccaactcaggctccagctgccttctctagttctgctca

SEQ ID NO: 87357 - DNA, 285 bp, Glycine max
  Clone ID: 700909416H1
ccatgatggttgcttctctcttctacctttctctttctctttccctcatcctaaccctctcctccgccgcgcaccacaaacccccccactcaccgtccaagccaccggctaaccccgccgtgaccgccgcctccccggcaatcgaacaagcctgcgccgcgacgctcttcccgcagcaatgcgaacctctctctcccaatcccagaacctccctccgaacccgacccctctccagctcctccagtccgccatcgccctctcctccgataacctcgccaccgcgca

SEQ ID NO: 87358 - DNA, 122 bp, Glycine max
  Clone ID: 700909417H1
ttttccctctgtcttccccccctcctctacacaaaaatatatttttagcatggagaaggtgaattttgtgaagaatggagagcttagattgcctccggggttccgtttccacacaacatacg

SEQ ID NO: 87359 - DNA, 52 bp, Glycine max
  Clone ID: 700909418H1
acctttgcaaaccctttccaacaattaagcaaacaattgttaaacgatggaa

SEQ ID NO: 87360 - DNA, 277 bp, Glycine max
  Clone ID: 700909423H1
gggaaaggtgattttccaatggattgtccccttcatgacagtctgcttcgcgttcattacaagggtactgttctcaatgaagaaaagagggtattctatgatacaagggtagacaatgatggtcagccattggagttctgttctggagaagggcttgtaccagagggatttgaaatgagtgttcgtttgatgcttcctggagagatagctcttgtcacatgccctcctgactatgcttatgataagtttccgaggccattaaatgtccctgagggtg

SEQ ID NO: 87361 - DNA, 279 bp, Glycine max
  Clone ID: 700909424H1
ccctcccccttctccatgggacagtcaccgtccaccaccgccgcgcctccgccagacctcaaccgccaccaaattcctcagatacatccaaacaccgattccgatttcaccgattacaccctccgtctctccgacgattgcctggccgcaatctttcatttcctgagcaccgccgatcggaaacgttgctctctggtctgccgccggtggctccgcgtcgacggccagaggcggcaccgtctctccctcaacgcacagccggaattactagacttcgtc

SEQ ID NO: 87362 - DNA, 126 bp, Glycine max
  Clone ID: 700909425H1
cttcggaaccctaaattgctctctttccgatgacgaccatgatgctttcgccttagtttcgtttctatgctctctctctctccctctctctctctctctctcactgtttccaacgtctttttcctc

SEQ ID NO: 87363 - DNA, 278 bp, Glycine max
  Clone ID: 700909426H1
agattcgtgatttaccatttaccacaccaaaaccaatcggatcgtttcctctgcggagtcagaaatccatggatccctacaagaatcggccatcaagcgccttcaattctcccttctggactactaattccggtgctcccatctggaacaacaactcatcgctgactgttggatctagaggtccaattctgctggaagattaccatctggtggagaagcttgcaaactttgacagggaacggatccccgaacgtgttgtccatgctcgtggagctagc

SEQ ID NO: 87364 - DNA, 233 bp, Glycine max
  Clone ID: 700909427H1
atttctctctgtcctgcgcacatttacacacctctcaaatctttcacttacagctttatttgaatccctctctctcctttccaaatggccagcgttgaggttgcacatcaaacaccaacaacagttccagaaaatgaaacaaccgaagtaatcaagacccaggaaacaaccccggaaccagtaccagccactgaggctcctgcaacagaacaagcagcagctgaggttcctgc

SEQ ID NO: 87365 - DNA, 276 bp, Glycine max
  Clone ID: 700909428H1
ctcgagccgcttctcaatcgcaaattttctcccccaaatcgtagatctacggttaaattgcgtgtagtgtggtaagatgggaggaggatttagagtgcttcacttagttaggccatttctctcgtttcttcctgaagttcaaactgctgacaggaaagtgccatttagagagaaggtcatatacactgtgatctctcttttcattttcctggtttgtagtcagctccctctatatgggatacactcaacaacaggtgctgatccattctattggat

SEQ ID NO: 87366 - DNA, 280 bp, Glycine max
  Clone ID: 700909429H1
gcccaacaaagggctgccttaaaggctcaaaaagaagctgaactgaaagagaaggagagggagaagagagcaaagaagaaggaaagaagaaagacatcttctgctgtcactgctgagaatacagaacaagaatctgctcataccacagaaactctaacaagtgtggaagaaagtgacctgactgagaaaccagctgaggtaacaaaaaagccacagaaaccatctcaattcacaaggcagaccaaggtaaaatctgtacctgcagctcttcgcaaccggg

SEQ ID NO: 87367 - DNA, 279 bp, Glycine max
  Clone ID: 700909430H1
aaagtccattcccaactagtcaatagtcatataaagacatacacataagaaaaatagttaatggtagtgaggtagagagggaaacagaaacaaataaaacaaagcaactttggcaagtaaagagagcttgttatcatggtagttgccaccatggcatggcgtcacaaggcggtgccaagggctgaagtcctcggcatcctcgcctttgacgccggaaaaaccatgtgccacctaatctccctctaccactccctctccgacaaagaaataaccaagctt

SEQ ID NO: 87368 - DNA, 272 bp, Glycine max
  Clone ID: 700909431H1
gcgacaaagatcgacgatgacggacgaaaccgaagaattggaaccgttgtttgattacagccgggttcagcctctgaaccccatcgacctcgatgatgattttgatgattacgaggatgtgatttgcgttgatagtaaaaagaggaagaattcccaggctgttgggaatgagaagactaatgggaaaggagtacacagtggtggacattgaggatgatgattggttgcctcctccaccagagatcgcaagtaatgcacagaagacacggacg

SEQ ID NO: 87369 - DNA, 283 bp, Glycine max
  Clone ID: 700909433H1
gcccaacaaagggctgccttaaaggcacaaaaagaagctgaactgaaagagaaggaaagggagaagagagcaaagaagaaggaaagaagaaagacatcttctgctgtcactgctgagaatacagaacaagaatctgctcataccacagaaactctaacaagtgtggaagaaagtgacctgactgagaaaccagctgaggtaacaaaaaagccacagaaaccatctcaattcacaaggcagaccaaggtaaaatctgtacctgcagctcttcgcaaccgggcta

SEQ ID NO: 87370 - DNA, 277 bp, Glycine max
  Clone ID: 700909434H1
gagcgagcgagggttttggtttttgtaaggcaaaagcagtgataccaatggggagcacggcggtggagaagacggaggaagaactccgcaacgagatcgatgagcttcttcgccaacagcgcgagattacggagaggcttcgagatcctcgaggtcttcgcagaggttccttggcgggtcctgctctcccctctaacggtgctcgccaacgaccctttattcgtcctgttactggagacaggaatgattctgaagatcaactcctgctaaacgtcga

SEQ ID NO: 87371 - DNA, 229 bp, Glycine max
  Clone ID: 700909435H1
ttcagcttttccctcgttgaaatgaaaatgggttcttctttgtggactttgtgtctaattttggcttcactagcctcttctgcattctgtgcctttccacggaggccagtggatgttccattcggcagaaactacgttcccacttgggcttttgatcacatcaaatacttcaatggaggttctgagattcaacttcatcttgacaagtacactgggactggcgtccagt

SEQ ID NO: 87372 - DNA, 252 bp, Glycine max
  Clone ID: 700909436H1
cagaaataaaaacgcatgccctcgtctctttttgaaaacactttagtttcgcaaagttgattctttctctctttatctttctttccccaatttgtgagtgttactgttgaatcgattggattggcattaggttgatctgaaatacgcaattgacatggcgagcgcgattgtagaagacgcgaacttcgaagatgaccaactagccaatatgacaccgacgacatcgtcagagcttctcgtcttctcgacaac

SEQ ID NO: 87373 - DNA, 270 bp, Glycine max
  Clone ID: 700909438H1
cggaatctgtctaaccaccctaaagatccggcggcgagccccaaaaccaaacccttcttaaaggagaatccaaaattcaattccaacacataaaatttctagtccgaggttgcctataaaaaccactttggacccccttcgctcattgcagcctcaagaatccacacaaactcagagacaggcagagagagagagagagagagagagagagagagagaatgggagggtgggctatcgcggtgcatggtggcgcttgtgtcgaccctaatc

SEQ ID NO: 87374 - DNA, 273 bp, Glycine max
  Clone ID: 700909439H1
tgtgattccatttttggaacactagaatttataatccttcagcctctaatatttgatggtcgaaagtgggtttttgatctgtatttgtgaatcaattcaaagtttaacaacaaacaaaaatcaaagtactgcgtaatcccccccaccctccaaaagaaaaaaaaggtttcagactttcaggggtcattatctaatttgttttgttttccgctctctatcagagggaattcgaacaaaagctctgtgctgtgagggccgatacagtggctacag

SEQ ID NO: 87375 - DNA, 275 bp, Glycine max
  Clone ID: 700909442H1
agattccacaacagtgggagggagatccaaaaagagagagtggaaaagatggcgcggttgatcacagtggtgtggtgcgcggtggcggtgctattatgcgccgcggccggtgcgtcgtgggtggaggaggcggcgaacccgatacgaatggtgtctggcgtggaggcggaggtggttcgggtgatcggggagtgccggcgtgcgttgaagtttgctaggttcgtgagcaggttcgggaagagttaccaaagcgaggaagagatgaaggagaggta

SEQ ID NO: 87376 - DNA, 236 bp, Glycine max
  Clone ID: 700909444H1
aacgaccactgaaacttcactttattccttacctgtcaccggggcatgtgatccctctctgcggcattgcaacactcttcgcctcacgcgggcagcacgtgacggtgatcaccactccctactacgcccaaatcctccgcaagtcaagcccctccctccaactccacgtcgttgactttcccgccaaagatgtgggccttcccgacggcgtcgaaatcaagtccgctgtcaccgac

SEQ ID NO: 87377 - DNA, 267 bp, Glycine max
  Clone ID: 700909446H1
tggtgcaattgtatcactgttaagtaggctagcaattgagaaaacattgtcccaaaaactggaagatgcacggagtgctgttcaactaagagttgtaaaagccctcagggaatatcgaaatctttatgctgtgcaacatcgcttggcaaacagaatgatatatcctgagtctttaaagttcttaatgttgtatggattagccctttgtagatcaacagctttacgtagagcgtatggtgatgttccactggatgaacgatgtgcagc

SEQ ID NO: 87378 - DNA, 279 bp, Glycine max
  Clone ID: 700909447H1
agcttccaaaccctaacactcctcttcctcttcgatcatcacctctccacaatgccgccgaagttcgacccctcccagatagtcgacgtcttcgtccgcgttaccggcggcgaagtcggcgcggcgagttccctggccccgaagatcggtcccctcggtctctcccccaagaagatcggagaagacatcgccaaagaaaccgccaaggactggaagggcctccgcgtcaccgtcaagctcaccgttcagaatcgtcaggcgaaggtcacggtggtcccc

SEQ ID NO: 87379 - DNA, 279 bp, Glycine max
  Clone ID: 700909449H1
ggattttgttaaagaattcttgctttatagcatattattgtggtcttggagcatcttttatatgacaattgtttctagttatgccagcatggtccaaattgttctgcttcttcttttatgtatgcaaggaaattctaataaaaactaagcaagaattatggacttaggtttaaaatcatcctacaaagctagatttagataatcacagcaaaaatcctagatgtttgaatcattcctttctaacatccatattggcaaaaagatctgtacagtaagttg

SEQ ID NO: 87380 - DNA, 265 bp, Glycine max
  Clone ID: 700909450H1
ctgggcccctgcatggtctggccaatcaggaggttctacgatggatcagatcaatagttgcagaatttggaactcctaacataagtactgaacaattggctgactacattaataaaacattgagtagaggccaggttgtgcctggatatggacatggggttttacgccagacagatccaagatacacatgtcagagggagtttgctttgaagcatttgcctaatgatccatatttccagttggtgtctaagataaaagaggttgt

SEQ ID NO: 87381 - DNA, 146 bp, Glycine max
  Clone ID: 700909452H1
agggttatcatttctccatttccattttctctctcacttttcaagaatcgtcagctatgggaaagtcttacccaactgtgagtgctgattaccagaaggccgttgagaaggcgaagaagaagctcagaggcttcatcgctgagaag

SEQ ID NO: 87382 - DNA, 274 bp, Glycine max
  Clone ID: 700909455H1
cgaaaatgtggaagagaacgggttttgaagaagaagcagttcaattgatcaactcagatttcagggacctaagtctagctgctaatagactcgcccatcatgccatcaaacttggtggcattggctttggagcctcttttttcggattgtttgctgccattgctgctatttatctgttgattttggatcgtacaaactggaaaacaaatattctcacagcactactcattccatacattttcttcagcttgccttcattaattttcgacgtctt

SEQ ID NO: 87383 - DNA, 274 bp, Glycine max
  Clone ID: 700909457H1
catattttccaagccttcacttagttttatgcaagtgtggtttttgcgagactagaaaacaatcacttagagaatgggaacgacacacaggttccaaatttagaaattggaggacaagtgttctggtgaaaggatccattctatcgctggaaaaatggatgctgcaagtggctgagtttcatgctaatgctgtagtttctgtgaaacctaaaaagccttcctttaaagaaaggaaacagaagttgcttacctttctacaagagaagtatgaacc

SEQ ID NO: 87384 - DNA, 274 bp, Glycine max
  Clone ID: 700909458H1
gaagtggaagattctcagcagagtctattgcaaaactgaaagcaaaggctaactcggagtgcaacacaaccaaaatctcatcgttccaatcattatcggcacttgtttggagatgcataactcgtgcgcggcgcttgccgtatgatcaaagaacaagttgcaagttgtccgcaacaacagaacaagaatggaaccaccactgcctcaggagtactttggaaactcaatttatacactgaatgcaggaaccgccacctcagggaaattgcttgag

SEQ ID NO: 87385 - DNA, 237 bp, Glycine max
  Clone ID: 700909459H1
agagagagagaaagtgagagatggagagaatgttccctcacatgaagcccgctactatgaattcccatgacagacccatgtgtgttcaaggagactcgggtcttgtcctcaccactgaccctaaacctcgcctccgttggactgttgagctccatgaacgctttgttgatgctgttactcagcttggagggcctgataaggccactcctaaaaccatcatgagggttatgggtgtga

SEQ ID NO: 87386 - DNA, 276 bp, Glycine max
  Clone ID: 700909462H1
cctacttctacttccctttgttctcaaaccttatcccttatcctcccaaaaccaaaccatgtctacctccgcagcttctctcgcactcccaaccctcactctccgaactcgacaacctctctgttctccccaatgcttctcctcgtccctctccctcacccctaactccaaacccatttccatttccgccgttttcctcaaaacaacgctgtcgtcgtcgtcgccgttgtcgctgtcgtctcgcttcgttccccatgtctctgtgttggagcagga

SEQ ID NO: 87387 - DNA, 270 bp, Glycine max
  Clone ID: 700909463H1
gtcttcataaacgcctttcttctccgtttccgtttcctcgttcgaattcgctttttgatctgcgaaaatgagagagtgcatctcgatccacattggtcaggctggtatccaggtcggaaatgcttgctgggagctctactgcctcgagcacggcatcgggcccgatgggcaaatgccaagtgacaagacagttggcggtggtgatgatgctttcaatactttcttcagcgagactggtgctggaaagcacgtgccacgtgcagtgtttgt

SEQ ID NO: 87388 - DNA, 274 bp, Glycine max
  Clone ID: 700909464H1
ggattttgttaaagaattcttgctttatagcatattattgtggtcttggagcatcttttatatgacaattgtttctagttatgccagcatggtccaaattgttctgcttcttcttttatgtatgcaaggaaattctaataaaaactaagcaagaattatggacttaggtttaaaatcatcctacaaagctagatttagataatcacagcaaaaatcctagatgtttgaatcattcctttctaacatccatattggcgaaaagatctgtacagta

SEQ ID NO: 87389 - DNA, 269 bp, Glycine max
  Clone ID: 700909466H1
gtgaactagttttagattcttacctggtggtaattaatgggaaagactttctaattttgttataacttataaatcataaactgcatccttgtactcatttgagatcaatgttttaaatcccgaattaggctatatatgaatattttgaaatttattatatagtctattaaatataatttctcaaaaatgataaaaaaaaaaaactcatagttgatgatgttcataattaacaataaaaagttgtaggtgtcatgaacaaaacatacaag

SEQ ID NO: 87390 - DNA, 263 bp, Glycine max
  Clone ID: 700909467H1
gtagttctttacagaaaccatgaaatcagaaagcatcaatttgttgctgttaccgagtggtctggtgggctgtatgtatctccaaccatagctggaagcaggcctggaagtcttattgccggtgcatgggcagcgatgatatctctagggaaagaaggatacttgaaaaataccaaagaaattatggaagggtcaagaagaatacagcaaggcatagaggagattgctgagttggttattgttggaaaacccgcatgacgata

SEQ ID NO: 87391 - DNA, 259 bp, Glycine max
  Clone ID: 700909468H1
accaaatccacgttccttacttcccagcgatccagtctccaacgatccctcgttgcccctttcatttccctcgcctccagaaattacgccaacgtgccggggcaaaaggaaaccaaagttaaggtccctctggctttgtttggaggttcaggaaactatgactctgctttgtatattgcatctgtgaaagccaatgcagtggaaaaggttgagactgagcttctgcaatttgttgaggcagtaaagaatagtcccatat

SEQ ID NO: 87392 - DNA, 272 bp, Glycine max
  Clone ID: 700909469H1
ctcaaacactagcaaagggaaggaaaagtaccttccccaataacccttctctccgatttggcttctctcatcggagggaaacaatcaataaaagaaaaaaaaaacccacaaaaagattataacaaaaaaagtatgaaaggaaaagtactaggttccgcagtttctctcatcctagtggtgggtgtggtaattggcgtggttgctgtagttcaaagcccaaagggcgtgaacaacaacaacaatggaggagaattgaaaaccagcaacagggc

SEQ ID NO: 87393 - DNA, 268 bp, Glycine max
  Clone ID: 700909470H1
tatctctccaacttcactccttttattcccttatcacttcttagttctttccttatcctttcgctatccagacatgtaatctctcctttaccaagttttgttttactatttgatcggatcggatcggatcttgctttcgccattaattactcatggagatccgtgccgatgcttataccagctccttttcaagtttgttcgcagctgtgtcatatggatttacatcaatggccatggtttttatcaacaaggctgttcttatgcagta

SEQ ID NO: 87394 - DNA, 272 bp, Glycine max
  Clone ID: 700909474H1
aatagaatagaattcagcacacacaacacattctctttctttgtagatcccactcaactcactcaggacccatccctcagcatctgagagagagccccacaaacacaaagggaatctgtctcaactcaactcagctcagtgcagaatgcgaaagagcaatgaggaatttccgaatctgagtctaaggaagccacccttaaagaggagcaagacaattccaaatccaaaacacacccatttctctgtctctgtctctgactccgacgagcaat

SEQ ID NO: 87395 - DNA, 262 bp, Glycine max
  Clone ID: 700909475H1
ccaaaccaacacctttcaaaatgcaaacatccttaacctttgctgcccccaacgttgtgcctttggcacaaacaaagagtttctcccatgttgccatcttccctaccaatttgaaagccccacgctcttcaactcgttactctccgatcagggttgcaatcgtggagcctgacacttcaactgtggactacaactctgcgttctcagtgtttccagcgaaagcatgcgaaactgttggaggggaagctgcatggcaaaatgt

SEQ ID NO: 87396 - DNA, 270 bp, Glycine max
  Clone ID: 700909476H1
ctttttaccaaatctacaagaaaaaatctacggatgggtttcaatcactaccttatattgttgcactattcagttcaatgctctggatttattacgcactcgtcaaaaaggatgctagcctccttctcattactattaactcctttggatgtgtgatagagacgatataccttgcaatcttcctaatttacgccccaagcaaaaccaggctttggaccatcaagcttcttctcatgttgaatgtttttggattcggagcaatgcttcttt

SEQ ID NO: 87397 - DNA, 269 bp, Glycine max
  Clone ID: 700909478H1
caaagttaaggtccctctggctttgtttggaggttcaggaaactatgcctctgctttgtatattgcatctgtgaaagctaatgcagtggcaaaggttgagtctgagcttctgcaatttgttgaggctgtaaagaatagtcccatattttcacagtttataagggacttgtctgtggctaaggatgttagagtaaaagtcatccaggatatttgtggtgaagctaagttttcagacgttacaaagaacttccttgttattgttgctgaga

SEQ ID NO: 87398 - DNA, 268 bp, Glycine max
  unsure (1)..(268): unsure at all n locations
  Clone ID: 700909479H1
caaagtttcatcaaatgtactctcaattaagagaaatttgatcaaatttgagctcagttacgtaataaactacttgacatttgatcaaatgtcaagtagtttattacgtaaacagaggtcaaatttgctggctgctcttgaacgctatgataattttgggcgggaagcccgaatgcaaccatattgtacaaaagaggacattgaggatgatgattgattgcataatcgtccanagatcgcaantaatgcacagaagaccacggacgag

SEQ ID NO: 87399 - DNA, 274 bp, Glycine max
  Clone ID: 700909480H1
tttttctctaagtctaaggggtgccctgagatcactttgagcaatggtgaaggctgtggcagttcttggcagcagcgagggtgtcactggaactattttcttcactcaggagggaaatggtccaaccaccgtaactggatctcttgctggtcttaagcctggtctccatggcttccatgtccatgccttgggggacactaccaatggttgcctgtcaactggagcgcatttcaatcctaataacaacgagcacggtgcccctgaggacgagaat

SEQ ID NO: 87400 - DNA, 268 bp, Glycine max
  Clone ID: 700909481H1
ccctcgttgaaatgaaaatgggtacttctttgtggactttgtgtctaattttggcttcactagcctcttctgcattctgtgcctttccacggatgccagtggaggttccattcggctgaaactacgttcccacttgggcttttgatcacatcagatacttcaatggaggttctgagcttcaacttcatcttgacaagtacactggtactggcttccagtccaaatggtcacacttgtgtggtcacttcagcatgaacatcaagatagt

SEQ ID NO: 87401 - DNA, 266 bp, Glycine max
  Clone ID: 700909482H1
atttctggggttggaggggagttgaagaaaatgctgtctgggccaactgggttacaccatgaagatcaaaagctgttatacaaagacaaggagagggattcaaaggcttttcttgacatggttggggtgaaggacaaatccaagatagtgctagtggaagaccctattagtcaagagaagaggttgttagagagaaggaagaatgctaagatggagaaagctgcaaagtcgatctcagaaatcagcttggaagtagataggcttgc

SEQ ID NO: 87402 - DNA, 269 bp, Glycine max
  Clone ID: 700909484H1
aagcacttaagttcttgcattctcaagcttcatccatgcttttgattggagaggtgtcaccggagatagtttgggtcgacgctaagggcgtccctcgccttaaggtcacccctcccctattgccgtgtttggatgtcaagggtttcgtttcttcgccctacgttgctcaagaggtaatagagaggaaaaatgtgacggagaagagtgagatatatgggttcggagtgatgctggttgaattattgacgggaaggagcgccatggacata

SEQ ID NO: 87403 - DNA, 269 bp, Glycine max
  Clone ID: 700909486H1
ctctccttctcgctctttcagctttgacttttgttggaaactaaggcctaatcaaaatggtgaagttcatccctgaagagctacgtcgtattatggactataagcataatatccgtaatatgtctgtcattgctcatgttgatcacggaaaatcaaccctcactgattctcttgtggctgctgctggtattattgctcaagaagttgccggtgatgtccgtatgactgatacccgtgcagatgaagctgagcgtggtattaccatcaag

SEQ ID NO: 87404 - DNA, 269 bp, Glycine max
  Clone ID: 700909489H1
catcttacaacttgaaactcttccgccatacctcacctctgatctacgtcgtcgtcgtcgatcttctgttcagaataataattttagatccctgatgcaacagaacaaggaatcttcttagattctttttctggaagaaagagaagacagatgaagaaactcttcttctttagacccgtcttatatatttatatacagtctctgattgatcggttttttcggaacctctattttcactcaactccacgcgtgatcttcgggcatggatt

SEQ ID NO: 87405 - DNA, 266 bp, Glycine max
  Clone ID: 700909490H1
gaagaagggatacgaggttctttatatggttgatgccattgatgaatatgctgttggtcagctcaaggaatttgagggcaagaagcttgtctctgccaccaaggaagggctcaagcttgacgagagtgaagatgagaagaagaagcaagaagagttgaaggagaagtttgacaacctctgcaaggtgatcaaggatgttttgggtgacaaggttgagaaggttgtggtctctgaccgcgttgtagattcacatgctgtcttgtgac

SEQ ID NO: 87406 - DNA, 266 bp, Glycine max
  Clone ID: 700909491H1
ctttctccgagaacaaaaaaaaaaacgtcattcgctcttctcttcgaataaaccacaaaaccaacaaacgagaagaggagtgagagaagatggggttgtcgttcacgaagctgttcagcaggttgtttgcgaagaaggaaatgaggattctgatggtaggtctcgatgctgctggtaagacaaccatcttgtacaagctcaagcttggagaaatcgtcaccaccatccccaccatcggatttaatgttgagactgtggagtacaag

SEQ ID NO: 87407 - DNA, 266 bp, Glycine max
  Clone ID: 700909492H1
gatagattccatcggtgcgtttctgctctgctagggtttcatcttcttccatcacctccgtcgcattgaaaccaggcttcatctgaatccgattccccttcgccccttctcctccttcactttcaccttctccgaatcctctaccaattattatcatgtcctccatcttcgtctctcacaaccttcgcgtctttggtcccggcttgaatcccttcgcaccttattgcatcgccaatcacaccctttcctctcgctaaataccaatt

SEQ ID NO: 87408 - DNA, 272 bp, Glycine max
  Clone ID: 700909496H1
gcaattttggtgacattttcgatgaaaatttcttcatacaatcacttggaaatcgtgtgcatgtggtgagagaactccctgatgacatacttcaacgatttgacaataacataagtaatattgtcaatcttagagtaaaaggttggtccagttcagctcactatcttcagaaggtccttcctcagcttttggaaatgggggctgttcgcattgcacctttctccaacagattagctcaagcagtaccctcaaaaatccaagggcttaggtgc

SEQ ID NO: 87409 - DNA, 256 bp, Glycine max
  Clone ID: 700909502H1
tttagatccagatggatggaaaactgtcttggttgacaacgttgatttcttggaagaactgaagtgaagagcaagctttatatgaaataagtagtcctgctgcttgtgtatgaataagttgtctcgcattttatcattgtgcgttttgtatcagtaccagtcatcaacttgttctcttggctttaatgggtccttttgttgacttaaaaccgcaattgacacctcattctgcatgctacctatgattaatctacta

SEQ ID NO: 87410 - DNA, 201 bp, Glycine max
  Clone ID: 700909503H1
ctttcgcatggtcgattgctttttattttatgattcacgttgcaggtgatgctgcccaatctaatctcttcgataagtatgttaggagaacaaacattatagggtgaggcaacccaattcaccctctgccggttaccatctcgttctgggcctgctgcattacttggagtgcatattagagcaggagaaggagatgaagat

SEQ ID NO: 87411 - DNA, 221 bp, Glycine max
  Clone ID: 700909504H1
gttctagatcgcgagctgccgcccttttcgccttttttttttttttttttcccgccggcaccgggttctttccttttccacctggtgtgcaatcccgggtctttttcaagttttttgggttcacaaaacaaaaaaaatgacctcaggaggggcccccccccgtctagtagtcttccccccggttgatcatgcccgcacgttcccccaagtggagcccgttt

SEQ ID NO: 87412 - DNA, 255 bp, Glycine max
  Clone ID: 700909505H1
aaggcatctcaggttcctccgcagcagcatataccatctggagaagttgttggtaattcagcatcaactgcatcgcagactaaggctagaatgcgttggactccagaacttcacgaggcctttgtggaagcagttaatcaccttggtggtagttagaaggctactccaaagggtgtgttgaatcaaatggaagttgaacaggctacctatctatcatgtaaaaagccacttgcagaagtatagatctgccatata

SEQ ID NO: 87413 - DNA, 253 bp, Glycine max
  Clone ID: 700909506H1
gtggttggattggctgcaaatagctgaatttgttgcagcctttgtgcttcagtgcttcaatgaagaataaccaatgacaactcccatatttttgtatgcccattttaacttaatgcacatactttcagattgtagccagctgttaaatcaatatagattttctttccaataccattatattagaaaagattgaaaaataatgaattgtaagaagcatgtcagactaaatggaatcctgtcattgctctgaatg

SEQ ID NO: 87414 - DNA, 254 bp, Glycine max
  Clone ID: 700909507H1
tttcaatcctcagtttctttcttcaacgtttccatcatacacagatcccaatcccctctcaagccctaatttcccctcatttccatggccacagaggaccccactgtcgcggtggaacacgctcccggacctgcctccgccgatcctcccccggaggagaaggaggagaccaaacctgaagccaaggctaagaaaaccaaggagcccaaacctaaaaaggtttccagacctcgcaaccctcccactcatccttc

SEQ ID NO: 87415 - DNA, 173 bp, Glycine max
  Clone ID: 700909510H1
attcggatctgaaatcgctcctcctccaatcgacgccgaagtcggtggtaggtgatcgaggatctggaccggttcctggcggacaagagggagagaataagcgcgtcgggactactgaacttcatggacgggcttttaacctcgtgttgcgccgaagagagtgttatggtgtt

SEQ ID NO: 87416 - DNA, 247 bp, Glycine max
  Clone ID: 700909513H1
gagtcagcggttttacttgcatcattttggaggacatctcttaatgaatcagagagtcagcggttttactttgatcattttgaaatccatccaataaagatcattgcaaactttatccctggggaatcacgttcaagttacagctcaacgcaggaggctctgaggtccttaattcatagtgtgattaaggtgcctcccataaaaaatatggtagtagaattgaacggggtcctgattacccatgctt

SEQ ID NO: 87417 - DNA, 207 bp, Glycine max
  Clone ID: 700909514H1
ccgtgatcagggtgagcacctccatcaagatgtcacgtcctatgacgtgccagatcctgatgccattccccagcgctcttcatggactggtaggtggtcgaggtgggcgaagctccttgcaggccctcgtacacggtcgacagtcacaacgctagacacagacgtggactatgcgtgcccagacacgaccgtcaccttggacatggc

SEQ ID NO: 87418 - DNA, 248 bp, Glycine max
  Clone ID: 700909515H1
gttttgatcgtccctcttcccaatttcagggtaagctttggatctcggatcggagccttacccatcttttctaaatcttcaaggaacgctttgggacactaaagtttccaagattgtagagagcacaacagaatgagagggaagacttgaatcaggattcaggggtgagatatttgaggatggttacttatggtgaaaggtgggctgataaatagggagtaagcatggaaaatttggtgagcaaatag

SEQ ID NO: 87419 - DNA, 226 bp, Glycine max
  Clone ID: 700909516H1
cagcaattgttgaagattctcgtcctccatcctcatggcctgagaatgggacaatccaattaattgatctgaaggtacgttacaaggaaaatcttcccgtggtgcttcacggagtatgctgcacatttcctggtgggaagaagatgggataattggtcgtactggagtggcaatctacttgattcaagcattatttcgattggttgaaccgggcagggatatccta

SEQ ID NO: 87420 - DNA, 54 bp, Glycine max
  Clone ID: 700909517H1
agctcgattcggtcgagcatgatctcctcgctccaacaatgttcccataccctt

SEQ ID NO: 87421 - DNA, 253 bp, Glycine max
  Clone ID: 700909518H1
atttcccttctgagctttgattagtgtggcctagttgttgttttctcgatgagaaaggcttcttccactatgcattgcgcatttctgcgcttttgggttcccttgttgctgcttgctagcttcagctatgctccttctgtttcggccacaactgaaatttcagggaatgaagtgaacacagatgggaaggtgataaatgaagagttagcaaaaccaagtctactaggacatgatgaagcagcaaatttcaaag

SEQ ID NO: 87422 - DNA, 253 bp, Glycine max
  Clone ID: 700909519H1
caagaagctaagagaatacaccaaaacccaacatgaaaacccttaacaaagcctcacttattttattccctctcttgttcctttccctattcaagcagtcccatgctgcaggaatcgctatctactggggccaaaacggtggagcaggcaccttagcagaagcttgcaacactagaaactaccaatatgtgaacatagccttcttgtccacttttggcaacggccaaactccacacctcaaccttgcaggtca

SEQ ID NO: 87423 - DNA, 255 bp, Glycine max
  Clone ID: 700909520H1
gaagagttggctgatataaaagatcaatttgatgctatagatgtagacaaaaatggttcgattagcctggaagagatgagacaggctcttgccaaagatcttccttggaaattgaaagaatcacgtgtactagagatattgcaagcgatagacaacaacactgatggtctagtggatttccgggagtttgtagcggctacattacacgtgcatcaattggaggaagactctgacaagtggcagcaactgtcacag

SEQ ID NO: 87424 - DNA, 192 bp, Glycine max
  Clone ID: 700909521H1
ccggtgttctcccagagtaggtgatatcctacagcttctccgcaaccggccacttggaagtcttccttgacccgccgtgcctgaccaaatacgagaacagagtcctcttcgagcaagttgtcaccgccaagctcacctatggaagtctcataggagtggagggtctccagcaagaggagctcttcctatggc

SEQ ID NO: 87425 - DNA, 256 bp, Glycine max
  Clone ID: 700909522H1
aatagatcaaggaaatgcaaatgtgggttggggagtaggacagacggcagtgcaggaaaacaggagttctagttcatacacttctgcagtaactccaggctttggggatagccaaacaaaatatggcagtgatcgattttctgtgtccagagatcggggttttcaaggtcatagtagggaatcaggtttgagtagaagcagaattccatataacaggcaaccgtcatatggtgttggaaatggagcatcatataag

SEQ ID NO: 87426 - DNA, 254 bp, Glycine max
  Clone ID: 700909523H1
cacactcattattactatacacaccctctttctcctcctcctccttcttcttcttctccttctatctctttctcattctatctttcaacatgggtggcatcagcctcgaagaaataaacaacgagaacgtcgatctggaacggattccaatagaggaagtgtttgagcagctgaaatgtccaagagcaggtctaacatcagaggaaggggccaatcggatcaaagtctttggaccaaacaaattggaagagaaa

SEQ ID NO: 87427 - DNA, 249 bp, Glycine max
  Clone ID: 700909526H1
ttcgagggtttccttcacatctctgtaatttccatttccacagttactcttgtgaattagcgagatttgaagcgagtgatggctgcgaaggaagagaatcgaatatttgttggaggtttatcctgggacgttacggagcgtcaactcgagcatgcctttgctcgttacggcaaaattctcgaatgccagatcatgatggaaagggatacaggccgtccacgtggatttgggtttatcacatttgcagac

SEQ ID NO: 87428 - DNA, 246 bp, Glycine max
  Clone ID: 700909530H1
acataattgagactttggttgatgaatacaaggcctgtgagtccccagattatatcacatggggaatggaggatccaaacaacatgctaacaggagaaggcaatgctacaggatcattggatccaaattcagtagcgtgaaaaaaaccaagtaccacaagggaagcataatcaaggaaagggtttttctgaaagatcaacaaggtttcctttgaagtttttaacttttatggggtgtgagatggtt

SEQ ID NO: 87429 - DNA, 244 bp, Glycine max
  Clone ID: 700909531H1
atttcttcaatcttctctcccttctacttctagggtttcgcttctgcaacggacgaccttcttcaactcatcaaagttgactttgtgagccaattcaatcaggcttgagaaggtatcctagtgttgtttgttcaccttcatctccatgatggaatactgtaaagatgtcctcagctgtcttgattcggatacgtctcttaagatattcatgtgtctggatgatctggctgatcttgttcgggtt

SEQ ID NO: 87430 - DNA, 237 bp, Glycine max
  Clone ID: 700909533H1
gctatttaaaaccatgggtgttagcattagaatcaaaacttaacttgtatgtatgtgtagtcgataaaactcaacagttttctgaactaaaattaaaaaagatcaaatgattaatagcttaacctattttcttgatctatgattgttccttcagtttttgttactggtaccctctaatttgagtgttttcatgtttttctgcagaatctcgtgctataatgaggtattatgcagaaa

SEQ ID NO: 87431 - DNA, 262 bp, Glycine max
  Clone ID: 700909535H1
ctctgttctctgcgctcggcgtggtgttcttgtgcccattttcaggagaccgagataggcagtgcgattcgatactgttcttcttcctgatgcttcattaggcgtcgcaatctgggtagtgacaactccatgttccaaccatgtaatggggtctaccttcagtgtgtcagtcttcggatctggtacttcacacgatttgtacaacatgttctgcgccatcgtgtggctgcactcgtcagtcgcggatttgttcggagcgttc

SEQ ID NO: 87432 - DNA, 267 bp, Glycine max
  Clone ID: 700909536H1
ctctgtattcggctcgattttgccacatggcataggatcctccgacttgatgcagtacgtgcgaatgcagaatggatgccatactccccttctcaagcaattgtaccagacattagggcatatcgttctgctgaggctgttgggttgacggattatagtcacctagatcccagcaggaatctttcatgctgctcgactagttgctattctcgaagcatatcgttgatacgacccttaaattggctactgccagggtataattgatct

SEQ ID NO: 87433 - DNA, 243 bp, Glycine max
  Clone ID: 700909537H1
gtccgctcgagctgaggccgtctctctgtggctccatgatcatcaatctagccgttgagagaattgcagactctagtgccctctaaagtagagattgagtatgtgcgagtcgatgacctcattaccgtgacgagatagccgatgatccacttggcgctattcactaggataggctcaggggtattctgaatctggtaaaaggtgctagtctcactatcgtcaactgtgggacggctcttgaac

SEQ ID NO: 87434 - DNA, 55 bp, Glycine max
  Clone ID: 700909539H1
ggtattcggctcgcgctctcctatatatacatatctctctcttccgcataccacc

SEQ ID NO: 87435 - DNA, 126 bp, Glycine max
  Clone ID: 700909542H1
tttctgtgccaacaaaagaagatggcctcacaggtttgcaaagctgcttccagagccgcgaggtcccttctctccgcttccagagcctcccataggacgtgacggtctggggctgctaacggctgt

SEQ ID NO: 87436 - DNA, 262 bp, Glycine max
  Clone ID: 700909543H1
gtttttatagtcctcaaagcaaatgacagtggagaaggaggaacgtttgcactatactcgctgatttgcaggtatacaaatgtgagtctgcttccaaatcgtcaacaagccgatgaacaaatctctagtctttaagctcaaactgacctagtcccagacactgcgcaaggtgcctataagtactaaagcgacagctttagaacaggacaccatttttccaagaacctattattgggtgttggttcttctggggagcttccat

SEQ ID NO: 87437 - DNA, 250 bp, Glycine max
  Clone ID: 700909544H1
ggaggaagtgctgaataatgctctaggcagagtcaccactatcgaacaagacttggttgcaagaaagaaggcacttgatgatgcccttgctcgacaagtagaactccaagctcaaattgacaagaagaagaaaaagaagaacaagttgttccgcttccgctgttttgctgcgtgatctcaaatgcatcaggaagagttgtaaaattggaggctttctatttcgactgcctgtttgattaaaaacctctgt

SEQ ID NO: 87438 - DNA, 244 bp, Glycine max
  Clone ID: 700909545H1
ctttctctctctaaaatctcaggactcagattgtgccctttttgacaaacctctgctctttgattccagttggcttctcagaagtgtgttagtgaagtatttattgaccagagaatggctgggactgtgagtgaggagtctggagtgggaaagtccgtggagggtatttcaaatgggcagcgttgtcaatctggggaagcattggcagagtggcggtcttctgagcaggtggagaatggtatcg

SEQ ID NO: 87439 - DNA, 246 bp, Glycine max
  Clone ID: 700909546H1
attgtatgttgtagtaactcgttctgctgcttttgttgttcggtgtgtgtgtctgttttttctctcacctgaaaatgtcttgctgcggtggtaactgtggttgcggaagctcctgcaagtgcggcaacggctgcggaggctgcaagatgtacccagacttgagctacactgagtcaaccaccaccgagaccttggtcatgggagtggcacctgttaaggctcaatttgagggtgctgaaatgggtt

SEQ ID NO: 87440 - DNA, 226 bp, Glycine max
  Clone ID: 700909547H1
caaaatcatcatgatttggtcagttaagataattctgggttttgtgacaattgatttcaatacgacggtttcctttttccagattttatggtagctgtaagatgatgtataaactgcagtcttgtaatattgaattggagacaagcatgtttcagtgataatgcgggaatagataatataatttctttcttttttaaaaaagaaattaaaaagaaagatgagtagg

SEQ ID NO: 87441 - DNA, 235 bp, Glycine max
  Clone ID: 700909548H1
atcctttggtatatccctatatcttgcttttaagcattcaattgcttccagctgtattatacttgtctaaggaagcaggagatgaaggatataacattgatgctgcccacctatccattgtgctagctgatcatggggtcctttctgaaggtgctggttctgggcaaaagttaggagtgatggatgcttatgcggaagtgtcgaccattatcaggcagtatggatctatgtattt

SEQ ID NO: 87442 - DNA, 245 bp, Glycine max
  Clone ID: 700909549H1
tcttacttcactgcacgtcttgctttactctttctctctcttacatgccggaatttcctctctctttctctctccggagaatagaatacataccctaaatcttcgctttgctgacacacacattagatcctgactacaactgctaacgttaggaattatgcgtcactagcgatgtccgattttgattccacaacgcgaaaccgtccggggtcgtggtcgccgtcgccgggcgccaagggaattcc

SEQ ID NO: 87443 - DNA, 249 bp, Glycine max
  Clone ID: 700909550H1
ggctgcctcttcttatgctatgcaatcaatcctggcaaaccctttgatccgcatttccagcgggtctagggtgaaccaatttggcgttcctgctttgcacatgagaaggaatgttggcctgagagttaggtccatggctaaggaagaacaaccaagtgagcctgcaaccccagttacaccgccacaatcgtaggacccagccaaagcaatctctgttccttcaccaaaggtgagcactaagtttctgtg

SEQ ID NO: 87444 - DNA, 254 bp, Glycine max
  Clone ID: 700909553H1
ctttctctctcctccccctctccctccatccacgaccttctccgctccaaaggcttgccccccggcctcctcccagaggaggtgaaatcctacagcttctccgaaaccggccacttggaagtcttccttgacgcgccgtgcctgaccaaatacgagaacagagtcctcttcgagcaagtcgtcaccgccaacctcacctatggaagcctcataggagtggagggtctccagcaagaggagctcttcgtgtggct

SEQ ID NO: 87445 - DNA, 143 bp, Glycine max
  Clone ID: 700909554H1
agaaaattctctttctctggtgcggtgtccaagaacggccccgcccaagggagggagctcgtggagcttgttgaagggagaggacgggaagaatagttaaatcgtaagaaaaatagatagactaaactaggaagggacacgtt

SEQ ID NO: 87446 - DNA, 253 bp, Glycine max
  Clone ID: 700909555H1
attcagaggtccgaaataggctacgtctctacgaaagccttgttccttcttctcccattctatccgtttctatccaaatatcccaccccgccatggtggtggcaacaaccaaacaccacttccgtttcctctgcacattcatcacgctgcaaccacattagcgtactatgctgttcttcttcttgttgttccctcctcagctatggaattcgccaggaccatgttctgttcttctccaccgttccctccaaga

SEQ ID NO: 87447 - DNA, 247 bp, Glycine max
  Clone ID: 700909556H1
tggaaccccaattgcagaagagcattccctgcttctgtttgctgaggttgctgaaaggtacaaaattggcctagctttaatttaagtaacattcagcaccctccttacgtatgctgttaaattgttttagtattgcattttaaaagctatgattttagtcttcatttctttacagtttctgagtttgttcctcactcttaaaatatcaaagacttaaaagtcagatatcatccaaacactcctttgg

SEQ ID NO: 87448 - DNA, 121 bp, Glycine max
  Clone ID: 700909557H1
caacaagtttatatgagtatcgaggatggaactcaaaagctgccaatcctacacaccgtcggcttacttggggccttagactgctggaaagacgcgtcggttgacttctacatgctcggat

SEQ ID NO: 87449 - DNA, 162 bp, Glycine max
  Clone ID: 700909559H1
gctcggagttcggcgcgagagcaaagcaactacatcagctcatggctacccccaaccccaccagattctcccttgccatggagagaaccgggcaatgggttttctccccagaaatcgcaccggtttagtgtgcattggaaaccaattttctctccacaagtt

SEQ ID NO: 87450 - DNA, 237 bp, Glycine max
  Clone ID: 700909560H1
gaaaaagggaagggaaggtgtgtggggttggaatgagtatactatacatgttgttgtggtgtggatgaagaagacacctcactgaattaaattaaccagggaaaacccactcttgctcatttcccttctctgtctctaaaacaccaaacccctctttttttctttctatcaaacacagtgcgtgcttttttgttcgtgttcttgttctttcgttctcctaattgtttcggtttatga

SEQ ID NO: 87451 - DNA, 247 bp, Glycine max
  Clone ID: 700909561H1
gtaatggattggcatcatttgaacaagatttttcatcaaaaatcctagttacatatcggaaaggctttgatgctattggagatacaaagtataccagtgatgttaattggggttgtatgcttcgaagcagtcagatgctggttgctcaggcattactttttcataaattaggtagatcatggagaaaacctattgacaagccactggataaagaatatattgacgtcttgcaactttttggtgattc

SEQ ID NO: 87452 - DNA, 263 bp, Glycine max
  Clone ID: 700909562H1
ctcggtattctgctcgagggtggacacatgaacagtgtaaatgtggttcaatcagcaactactgataaccaagcagggtggcatgatattacaccagtgaatgaactgaaagtcacatcaaatgttcttgaaacccaaccaggaaaggcaccatcattggaaagtgtgtcctcatatatttggtctggatcaatctcaatcaatctccacattgatgctatgtcctctgcagaaattcctcttcagatctgtgtgttctctcc

SEQ ID NO: 87453 - DNA, 146 bp, Glycine max
  Clone ID: 700909563H1
ctttttctgatatcttttacgtgcccatcaaacaaataagctctccactctatttcagtcaccaatcaccaatgactccttctttcactaacgtcaaaatcttctcttctctcgtcctagacggattcttcaacgctctcaccaga

SEQ ID NO: 87454 - DNA, 248 bp, Glycine max
  Clone ID: 700909564H1
tggcactggagaaagtggctgcgtctttggaacttccctgtaaatatcaaggttttgggtgcatcggtatatatccatattacagcaagctaaaacatgaatcgcaatgtgcacatagaccttacaactgtccatatgctggttcggaatgctctattatgggtgacataccctacctggtggcccatctgaaagatgaccataaagtggacatgcacaatggtagcacttttaatcatcgctacgtc

SEQ ID NO: 87455 - DNA, 254 bp, Glycine max
  Clone ID: 700909565H1
ccagattagtaccacaaaaatggagaaatagaataactgaatatcgtatagctcaaaataaagatttaaccaaatgcaattcatatgaaaaaagccaattaattctttacaaagaacaacaagtaaacggattaaaaaaggaaattagaaaagaatatggatacgatcttttatcctataatttgatcaattatgcagataagaaaggctcatatatttgtggatatagatccctatttcaagtaaaaaaagac

SEQ ID NO: 87456 - DNA, 250 bp, Glycine max
  Clone ID: 700909566H1
gattttctttgggaagacgttgagtctgatcgactcaacctcaaccttctcctggttcctgcattgcgttgctctctctctaccttctaattcccaaatttctagggtttggtacagagagaaataggaacataagatgtctcagaacgggaagctgatgccaaatctagaccagcatagcaccaagcttctcaatctcactgttcttcaacgaatcgacccttttgtcgaggaaattctcatcaccgct

SEQ ID NO: 87457 - DNA, 252 bp, Glycine max
  Clone ID: 700909567H1
attgggttctcttgcaagctttacagctacagtaatggtttcataggtcaaatatcgatgctgttacatgtactgggatggcagttgtaatgtgtggaaattttattcttacggagattttgaagtggaggggaagatcactggctcagtcgaatcaacaacaaggttcccaagtagcagtaccgccacctgatcaatcatctactatccctcatcaagctcagattggttctgaacatactgaaagtaatt

SEQ ID NO: 87458 - DNA, 253 bp, Glycine max
  Clone ID: 700909568H1
agacaacagaggaacactcccaaacaaaccatggacgtgggtcagatgcagagacagtggatcgactacaccaaatccctcttcctcgagggcttcctggatggtcagtttctgcaacttcagcagcttcaggatgagaacaaccctgactttgtggtcgaagttgtctctctcttctttgaagattctgaaaggcttctcaaagatctcacctttgccctagatcagaatggcgttgacttcagaaaagttg

SEQ ID NO: 87459 - DNA, 251 bp, Glycine max
  Clone ID: 700909569H1
ctgaggccttctttctctgcctccaccccatcaaccttgcctgtcacagaattgcggactgttggttcctctaaagtggatattagggatgtgcaggtagatgaacacgttaccgtgacaagatggtccaagaaacatagggccctattcactggcagaggctcagaaaaagtcgaaagctggaaaaaagaactaagcactcaatcgtcaacttgggacgtttctgaaacgtcaaagcctgcctcaaagac

SEQ ID NO: 87460 - DNA, 253 bp, Glycine max
  Clone ID: 700909571H1
gtacaacacaaccaggtccctgaatgctttttagagagagaaagagtaataataataaagtggaagaaaaagaattaggagagtgaaacaagaatatgaagaagaagaagaagaagaagaagagttgagaagatggtgtttgaggaaactgagctgaggctgggactgggactatgtctccctggaaatggaaccacggcaacaactgaagctgctgctgcggaattaggagtgaggaagagagggttctctg

SEQ ID NO: 87461 - DNA, 150 bp, Glycine max
  Clone ID: 700909573H1
tgaccagcaacctccgcacaaaatggatgagaacatgtggaagaatcgagagtacattgaagaaacaatttttttacttcagagttctaattggccagaggcgctgaagcagcagtccacagctgacagtgttgaatttgccattacgct

SEQ ID NO: 87462 - DNA, 247 bp, Glycine max
  Clone ID: 700909574H1
cacttgcaaggtttctccctgatggccttgtgtcagtaattagggatggacctggtgaagctgttgtagttggtcttgagcagactacagagacaccagaacttgtatggacaccagcgatggcagcttccttatctgcacaaatttccactatggcattagagctataccgtgagcagatgaaggggcgtgttgttgattgggatttgcctgagcaggcatctggccagcaggaaatgagagatga

SEQ ID NO: 87463 - DNA, 248 bp, Glycine max
  Clone ID: 700909575H1
ctcttcactttcaatctctttcccttcctttccttgtctttctattcctctagatcaaaattgttatattatcacccatcaaacattccacacttctccccctccctttgaaaacacctcaatcaatctcgatgatcatggcagcactcaattcaagcacttgtgccatacctcaattccctcacgctctctcctccactatctctgctgcttcatcattagcaagagatttgggcttccccacaagg

SEQ ID NO: 87464 - DNA, 247 bp, Glycine max
  Clone ID: 700909576H1
ctcgagccgggaggagggaggtggagtgcgggcgagggtaactaaccaacgctaagcagttgttgagtttggttggtagtagatgagcgaagtgttgacgatggcggacgtcacggcgaacttgcaagcagcaaccaccgcatccaccccttacgcgctccccaccaatctccctctcctctccgctttcctctccttcgctctcgcacagttcctcaagatcttcacctcctggtataaggaaaag

SEQ ID NO: 87465 - DNA, 244 bp, Glycine max
  Clone ID: 700909578H1
tggaaaccatatccaagcggtttgaagaacttaatgtttgtggcaaagttactctaaagagcaaacttcgggaaattgcctaccctactctaaactctatgtgtcatcctccaaaaaaggtcaaaacaaaaggtgttcaaaagaaaccgatgaccaaacatcaaagatcaacaaagggtgattcgtcttaatggaagtatgttgatgtattacattctatgcaaaatagtaattcttcagtcaa

SEQ ID NO: 87466 - DNA, 150 bp, Glycine max
  Clone ID: 700909581H1
aaagaatttagatagccttgctctcaaatccaaccctctcagactgagcagagacacacacacacatcctaatcacaaagcgttggccatggcatacatgattgtggcttccaccaaacctctggttgcggtctgcaccagttcccgttc

SEQ ID NO: 87467 - DNA, 150 bp, Glycine max
  Clone ID: 700909582H1
gtgaagagaagcaatttgccgcagaagaaatctcgtccatggtgctcatcaagatgcgtgagattggcgaggcttacctaggctccacagtgaagaatgctgttgtcaccgtccctgcttacttcaatgattctcagcgtcaagctacca

SEQ ID NO: 87468 - DNA, 146 bp, Glycine max
  Clone ID: 700909583H1
gaggaatcaaagtacagatagaatcaactatctctcttttccttcctcgtccttcttttttctcatttccttctaaacataaaatgcatttgtgattctgccacaataattataagttcagaaatcttaattactgccctctggtc

SEQ ID NO: 87469 - DNA, 254 bp, Glycine max
  Clone ID: 700909584H1
cgttcatggatccagtaagcgtgtggggtaacacgcccttggcgacggtggatcccgagatccatgacctcatcgagaaggagaagcgccgtcaatgccgcggaatcgagctcatcgcctccgagaacttcacctccttcgccgtcatcgaggccctcggcagcgctctcacgaacaaatactccgagggcatgccgggcaaccgctactacggcggcagtgaatacatcgaccagatcgaaaacctctgccgc

SEQ ID NO: 87470 - DNA, 149 bp, Glycine max
  Clone ID: 700909585H1
tacatttttacataccattcttagccgccacttttctatattcatctgtaggaataacttttcatctgtatcaattttccccgtctaataaaaagggtttgactttttcttataatagagtttttttgtttcggctttaggtatttgta

SEQ ID NO: 87471 - DNA, 250 bp, Glycine max
  Clone ID: 700909586H1
aagattttgtccaattgaacttgtaaaaatgactgggataaacttaagaatccaattattgaaattgaataagtaaacaatttaattggattggtccaatggtatcaaaaaaatggagtactaactcccatttgttatttattattgagttaaccgatcagcttgctttgttgtcgaacatgtctttttgatttcagagattttccggaaaaaatttgaatctatggctatatgcgaatcaatcctacta

SEQ ID NO: 87472 - DNA, 132 bp, Glycine max
  Clone ID: 700909587H1
gagacgttatgagttccctccctttcactctttaatccccatcagcaaaacagtttccaaatggtaatagtagcattatcctcctcccttcccgccggaagaaacctcttctcctccattgcacacaacata

SEQ ID NO: 87473 - DNA, 250 bp, Glycine max
  Clone ID: 700909588H1
gaaaatgttggtttgtctctctcatatggcttgtcattaaatgccgtgatgttctgggctatatacatgagctgtttcattgaaaacaaaatggtatctgttgagaggatcaaacagttcacaaatattccatcggaagcttcatggaacattaaggatcgcctgcctcctgcaaattggcccggggaaggccatgttgatatcaaagacttgcaggtcagatatcgtccaaacactcctttggttctta

SEQ ID NO: 87474 - DNA, 248 bp, Glycine max
  Clone ID: 700909589H1
aagaggactgtccatgatgttgtacttgttggtggttccaccagagttcccaaggtgcaacaactcctgcaagatttctttaatgggaaggagctctgcaagagcatcaatcctgatgaggctgtggcatatggtgctgcagttcaagctgctatcttgagtggtgagggtaatgagaaggttcaggatcttctccttcttgatgtcacccctctctctcttgggttggaaactgctggtggggtgat

SEQ ID NO: 87475 - DNA, 245 bp, Glycine max
  Clone ID: 700909591H1
ctctgattggcctagccagtagtagccaatttgttggagctggttgggaatggcgtcgaaaacgaaatcaaatggaaattccaaatgcaacaacggatccgctgacagctatatgctgttgaatcctgaagacgctcatttcttcgatcttgttcatgtgctgtattcccgtaacttgggaaaccgaaaatttgtggacagcaatgctgagggatcttatgagggaagcttccgccaaagatggc

SEQ ID NO: 87476 - DNA, 246 bp, Glycine max
  Clone ID: 700909596H1
acgatgtgtaaagtatctgaatcgctctgtacttgaagggcgtgtcatcacggtggagaaggctaaaagacgacgtggtcgaaccccaacgccagggaggtatctaggactgagaactattcgtgctcgacgtcgctctccaagttactctcctcgtcgctctcctagctattctcccttcagaagaagctacagtcgctctccctattcttcagaccgaagtaggagtcgttcttactctcctga

SEQ ID NO: 87477 - DNA, 264 bp, Glycine max
  Clone ID: 700909601H1
tttggctactggctgtcatcccttctttcatcttcttccactgtctgtctacactacggacagagcttttttcacaccacagctaaaagtgctgcaatagagcccttcttctcccttcttcttctctacccacacccaaacccaaaccaagttctttctttctaattcccttgataatgtaaaatcacagaaaaacaaaaaaagctactcaaaacttggctccaattagcctttctttttttgttttgaggaaaaacagaaaag

SEQ ID NO: 87478 - DNA, 256 bp, Glycine max
  Clone ID: 700909603H1
ttcagacagagactgtcagcttcgccccgccatgaacgctattgcaactgctgcagttctctctctccctttctccttctccaaatcatccaaacttgacaccaaaaagggtttaaaaggaaggtttagagtgtttgctgtatatggagaagagatagataagaagaatgcatggagtgccctctttgatgtggaggatccacgatctaaagtgccgcagtataaagggaatttttggatgtatatcaagcccttg

SEQ ID NO: 87479 - DNA, 255 bp, Glycine max
  Clone ID: 700909604H1
ttgaggatgtaccactccggtgccgttttgcttcgcgatgggcgagttcttctcgctgggagcaaccctcacacgtattacaatttcaccaaagtgttgtttccaacggaactgcggttagaagcgttttctccttggtatcttgagcccggattctctaacgtgcgtcccgcaatagtatctcctgcgtcccaaacaaaactcaagtacggtcagacgttgaggcttcggtttaaggtgagcgcgactttggtt

SEQ ID NO: 87480 - DNA, 254 bp, Glycine max
  Clone ID: 700909605H1
tgtcgtgacataagcaaaaggaaagaatatcaacaaggtaaagtagattccttactagacatggcgttgaaggacacattctacatatctcatggatcaccaactttgtccatagatgaatccattcaggccaggaagttccttcagtcatggaagaaggacgtgtttcctcaaagacccgcttcaattcttgtcatctctggtcattgggaaaccgcagttcccacggtcaacgtcgttgactccatcaacga

SEQ ID NO: 87481 - DNA, 252 bp, Glycine max
  Clone ID: 700909606H1
ttagcatcatcctgatttgattatgtgccggaagcagccagggattgccattggacgactgtgcgagatatgtgatggcaagtgtgtgatatgtgactcttatgtgcgtccttgtacacttgtccgagtttgtgatgaatgcaactacggatcatttcagggtcgatgtgtcatatgcggaggagttggaatatctgatgcctactactgcaaggaatgcacacagcaggagaaagatagagatggttgccc

SEQ ID NO: 87482 - DNA, 249 bp, Glycine max
  Clone ID: 700909607H1
tcctgatgcatataaagctgcttggggtcttttgaaggtttttagtcattctactatttggactgttttagactaaatgcatttcctttattttgtgtcaatactgcattaatttaattttaaatgtattgaattgtagatgtagattatcttaagatgttccctaaatgaacttatgttacagggtgctaatgggattctagttccaggaggttttggtgacagaggagtggaaggaaaaattcttgc

SEQ ID NO: 87483 - DNA, 251 bp, Glycine max
  Clone ID: 700909608H1
tacgaaacagaaaatgccaggtctcacagcaccttccgattactcccaagaacccccccgccactcttctcttctcatcaacgccaaggaacctttcaatgcggagccaccgcgtgctgcgttggttgcttcctacgtcaccccttccgatttcttctataagaggaaccacggtccaatccccatcgttgagaacatcaacagatattccgtgaacgtgtccggcttggtggagcgtcccaaacagctct

SEQ ID NO: 87484 - DNA, 245 bp, Glycine max
  Clone ID: 700909610H1
tgtgaacggtgaaaagtgaattccagaaagaagagaatggcaagtagcggtgctgcaacagcggcgttgcagagcgatgcaagtagtagaatggaaggctggttgtaccttatacgcttcaaccgtattggacttcagttctctcggaagcgttacttcgttctcgatggtaaccttctccgcagcttcaaatcagttcctgtgtcaaataatcaggatcctgttagaagcgcgattgtacgatt

SEQ ID NO: 87485 - DNA, 248 bp, Glycine max
  Clone ID: 700909611H1
tattgaaaggaagacaaaacacaagacagagtcattcagcaaggcttgaaacgagaagcgaggatgcccatcagatgtattctgcattggccaccgaaccaaggaagcgttgtgaacagccaagtcctgaatgagatctcgcagtgcgtcgaaagccttaacggcgtcaaagaaggaagatgcaaagcctccctcactttctacagacccaatttacgagaccaatcggtgaccatcgattttcctcg

SEQ ID NO: 87486 - DNA, 161 bp, Glycine max
  Clone ID: 700909612H1
ctgtttgtgactttgtgttgctcgctccctactctgttatgctgctccttgctttctgatttcaagggtgtaaaccctaaaaaggacccacggcgagaagcttccaactcctctctcacgcgcggacctccccctccggcgacttctgcaccgacggacgg

SEQ ID NO: 87487 - DNA, 94 bp, Glycine max
  Clone ID: 700909613H1
tttttacagcaatggtggtgttgttttgccacacaaggagatcaagtcaaatattgctgaagccggagattggtcatggtgagttgaggtgcaa

SEQ ID NO: 87488 - DNA, 246 bp, Glycine max
  Clone ID: 700909614H1
tctcttcaactctccaacctttcactccatgagtctctcgttctctctttctctagaaacagtcttctcttttctcttttctcttcttctctctttttcagttgcaacatgagatgatgacagagatcacaaacctaagcacagacctcatagagctgatcctgtccctcctcccaatccccatcctaatcagagcctccacagtgtgcaagctatggcactccataatctcctcatcttccttct

SEQ ID NO: 87489 - DNA, 158 bp, Glycine max
  Clone ID: 700909615H1
ggacaacggaggtcactcgcacctagacgacgaagatcacttgttactcggcataggtcaccttcaccagtacgccgaataccgccaaccagtgtgcagaatagatcagactcccccatgcaatccccctcccacatacgacaagagtatggtagtag

SEQ ID NO: 87490 - DNA, 244 bp, Glycine max
  Clone ID: 700909616H1
cacacaccttgttttcctttctatagagacacacagagagagccataaacacccttcaatggctaccactaccactaaagtttacattgtttactattctatgtacggacatgttgagaagctagctgaagagattaaaaaaggagctgcttctgttgaaggagtagaagcaaagctatggcaggtacctgaaacactggctcaagaggtccttgggaaaatgggagcactccaaagagtgatg

SEQ ID NO: 87491 - DNA, 259 bp, Glycine max
  Clone ID: 700909618H1
tatttattttctttctgcttctcatggatctctcctcactctcttcataccgcactgtcggagtaacaccttctgatcctcgaaaatcacttcctcaatggggtcttcatttcctctcctacactcacaggctcaaccagattaagaaaaggtcaagtggggtatatgcatcactatccgagagagagagaggagagtattattcccagagaccgccaactccgctactagacaccgtcaactatcctattcatatgaa

SEQ ID NO: 87492 - DNA, 255 bp, Glycine max
  Clone ID: 700909619H1
tctagatagaattttatagagagagagagtttttagagagagctaggatgaagatcacggcattgttggtgcttaaatgcacaggtgagggttccgatcccgttattctggcgaacgcttccgacgtcagccacttcggttacttccagcgttccagcgtcaaggagttcatcgtcttcgtcggtcgcaccgtcgcccgtcgcacccctcagggccaacgccaatccgtacaacacgaagagtacaaggtgcaca

SEQ ID NO: 87493 - DNA, 253 bp, Glycine max
  Clone ID: 700909620H1
tgagattttgctgctctttgaagaagggtgtttgcttgattttggagatgtcgctgctctcagatctcatcaaccttaacctctcagacactactgagaaggtgatcgcagagtacatatggatcggtggatcaggaatggacctgaggagcaaagcaaggactctcccaggaccagttagcgacccttcaaagcgtcccaagtggaactatgatggttccagcacaggccaagctcctggagaagacagtga

SEQ ID NO: 87494 - DNA, 253 bp, Glycine max
  Clone ID: 700909621H1
gtgacaagttgagtatgcaagttaaacaaacaactgcaagggaaataggggcctaactttatatatctgcgtgagtgagtgcgtcatttctttctttctctgcttccctaaccaactgaaccagcagcaacatttgcgcaaatcgaaattgattctctgccacttaacctaaaatggaaatctttccgattcccgccgaatcctacactctcggcttcatcggcgccggaaaaatggccgagtccattgcccg

SEQ ID NO: 87495 - DNA, 249 bp, Glycine max
  Clone ID: 700909622H1
ttgatctcagattgcaattgcctcttctcttctcccagaatcggtgtaggttacaggtttaagggttttgttttcatttaggtcactaatccgatatcatgaagctcgatacgactagtctcgaatcgtttcccacactgattgcacctcaaaacgacgtcgccggagaactctccgccgctccgttctttgaccttccgaattccaatgacttcgatgggttcttgaaagacgctatcagatggtgaa

SEQ ID NO: 87496 - DNA, 248 bp, Glycine max
  Clone ID: 700909623H1
gtgaaagccaagattcaagataaggaagggattcctccggatcaacaacgtttgatcttcgccggaaaacaactcgaagacggcagaaccctcgccgattacaatatccagaaagaatcgactctgcatttggtgcttcgtctccgcggagggatgcagatcttcgtgaaaaccctaaccggcaaaacgattacgctagaggtagagtcctctgacacaatcgataacgtgaaagcgaagatccagga

SEQ ID NO: 87497 - DNA, 247 bp, Glycine max
  Clone ID: 700909626H1
tgaagtttgtggggggtgaaactgcagcattgagcagagtatatgaatacttttgggaagaaggacttgctggagggtatatagaagagaccaggaatgtggatatgtggggcctgattattctaccaaattctcaccatggcttgcctcaggagatttgtctcctcgtttcatatatgaagaggtgaagagataggagaatgatagactagcaaatagttctacctactgggttttgttcgagttg

SEQ ID NO: 87498 - DNA, 242 bp, Glycine max
  Clone ID: 700909627H1
ccaaacacgacacaaacattaagaagaagagacataccacgaaatgtacggacaaagtagctatgagtccgatttggcccttttggactccattcgccgccacttacttggcgactccgaggagcacaaattcggagccccgaatgttagttcgggtaacactccagcgtactctcggagctcctgtttcagcacgttgtacccttgcttgagtaacgatttgggagaattcctcttaagga

SEQ ID NO: 87499 - DNA, 239 bp, Glycine max
  Clone ID: 700909628H1
cttatatgttggatccacatgttaggaaaattagggatgagagatataggtggaagtatagttgtggagctaagggctgcacaaagctttttcatgcagctgaatttgtgcacaaacatttgaagctaaaacaccctgagattgtgatggaactaacatccaaaatgcgcgaggatctttattttcaaaattacatgaatgatcctgatgctcctggtggaatgcctgtcacgcagcaa

SEQ ID NO: 87500 - DNA, 240 bp, Glycine max
  Clone ID: 700909629H1
gtttgggtttcacaaacagacacacagtcggttcttccttctcaaatattcttgagatctcccattttctccgaagcaaagccatggctaagggtcctggtctctactctgacatcggcaagaaagctagggatctgctgttcaaggactaccacagtgaccagaagttcaccatcaccacctactcaccgactggagtggctattacagcatcaggaaccaggaaaagtgaactgtttc

SEQ ID NO: 87501 - DNA, 225 bp, Glycine max
  Clone ID: 700909631H1
tttgattgcacacactggtggacccgcaattttggaccaagtttaggcgaagttaggcctgaagcctgaaaaaatggaagctactagacatgtgctcagcgagtatggtaacatgtcaagtgcatgcgtgctattcatacttggatcaaatgaggaagtaatcaagagaaaatggacttggcacaaccggtgaaggtcttgactggggtgtgctattgggttcgg

SEQ ID NO: 87502 - DNA, 247 bp, Glycine max
  Clone ID: 700909634H1
tggtggaagggtgcatgcacggggacctggacaatgtctacagaacccttcaacagttggagaaatctgaaaacacgaaaatcgaccttctcctctgctgcggcgatttccaagccgtgaggaacgagcatgacttgaagagcctgaacgtccctctcaaataccgctccatgaaactccttctggaagtactattccggcgccgaagttgccccctaccccgacatcgtcatcggcggcaaccacg

SEQ ID NO: 87503 - DNA, 253 bp, Glycine max
  Clone ID: 700909636H1
tttcccccaaaaaataaaaagcacaccttcattcgttcctctttctttcttccaactctataaatatcaatcaaaattcccctccacactcattctcccatcgttttccctttctctctctcattctcttctccatcgcgcgtaagaaacacattttagttgctactaatgggaactgttgaagctgcaaacaaggatgcaaatggaagtctcctagagaaaaatccttcattgtttttgtgttaggtggccc

SEQ ID NO: 87504 - DNA, 253 bp, Glycine max
  Clone ID: 700909637H1
tattcatcaaactcatcaaaatgaatctgtaccactcctccaccaccaccaccaccaccaccatcttcaccgtcatattcctcctccttgcaatattattcactctcacaccccacaaggccaacggtgccacgtgtcaccctgaggaagaagcgggcctgttgggcttcaaatccggtatccgatccgacccgtccggcctgctcagtaactggatatcgggtacggactgctgcacatggaccggagtaga

SEQ ID NO: 87505 - DNA, 248 bp, Glycine max
  Clone ID: 700909639H1
ctagttcttaacttgttacagaaagttctctctttttatgttctttctgcctccaaattaccactctcttcctatgctatgatacagatacaggaagaggatcaaaataccccaccataagacaaacccaaaggaatagcaacgtcaattatggtgggaggtttcaatggagaaggtgttgtgagagaaaaagaggaagaagaagaaaacaacaagtggccttcatggctgcagccacttctcaagac

SEQ ID NO: 87506 - DNA, 242 bp, Glycine max
  Clone ID: 700909642H1
tggtggaagggtgcatgcacggggacctggacaatgtctacagaacccttcaacagttggagaaatctgaaaacacgaaaatcgaccttctcctctgctgcggcgatttccaagccgtgaggaacgagcatgacttgaagagcctgaacgtccctctcaaataccgctccatgaactccttctggaagtactattccggcgccgaggttgccccctaccccaccatcttcatcggcggcaac

SEQ ID NO: 87507 - DNA, 243 bp, Glycine max
  Clone ID: 700909644H1
tttcccccaaaaaataaaaagcacaccttcattcgttcctctttctttcttccaactctataaatatcaatcaaaattcccctccacactcattctcccatcgttttccctttctctctctcattctcttctccatcgcgcgtaagaaacacattttagttgctactaatgggaactgttgaagctgcaaacaaggatgcaaatggaagtctcctagagaaaaatccttcagttgtttttgtg

SEQ ID NO: 87508 - DNA, 119 bp, Glycine max
  Clone ID: 700909645H1
tttcatcaaactcatcaaaatgaatctgtaccactccttcaccaccaccaccaccaccaccatcttcaccgtcatattcctcctccttgcaatattatgtcactgctcacaccccacaa

SEQ ID NO: 87509 - DNA, 242 bp, Glycine max
  Clone ID: 700909647H1
ctagttcttaacttgttacagaaagttctctctttttatgtgctttctgcctccaaattaccactctcttcctatgctatgatacagatacaggaagaggatcaaaataccccaccataagacaaacccaaaggaatagcaacgtcaattatggtgggaggtttcaatggagaaggtgttgtgagagaaaaagaggaagaagaagaaaacaacaagtggccttcatggctgcagccacttct

SEQ ID NO: 87510 - DNA, 257 bp, Glycine max
  Clone ID: 700909649H1
actaactccagagtgtccacagaaccatacgagtgtttctcggattcagaaaaagagctatgttggtgatggttaattaatgaatgaagaatggcaaaaaaagctgtgttttttcttcttccccacagagctttttcttcctcaaccacagaaacccccaccctttactccttccttcagccctcagtctttgctctcaccaaaaaacaacaccaacccaattcagagccttctccaaagtccccaactttactctc

SEQ ID NO: 87511 - DNA, 256 bp, Glycine max
  Clone ID: 700909650H1
gtttttgaattccaccttctccgaccaatggctgccaaacctcttactaccgaggcgattgcgcttacggaaaagaagatggacatgacactagatgacataatcaaaatgtctaaaaacccgaagaataagaagcaaagaagggttccgaacaaaagtcaaaaattttcaaacaattttactcaggataagtctgcaaaggtccagcgttatatggaatcgagatcttctcttagacagggggctcttgcaaaaa

SEQ ID NO: 87512 - DNA, 174 bp, Glycine max
  Clone ID: 700909651H1
atctaatggttactatgacagggcaatagttttaaatgtgtataaagcctcatcgttgcaagcttatcttgcgatggatgcaggcctacactgccgattcgagaaaggaggttggaatgttacatggctgagccaatgaatttacgtatgtgggaaccgccactaacttagttt

SEQ ID NO: 87513 - DNA, 248 bp, Glycine max
  Clone ID: 700909653H1
tgaacgaacagttttgggtgatcggaggtgtatcttctcatctttttgccctatttcagggtttactgaaggtcttggctggtgtgaacacaaacttcactgtgacgtcaaaagcagcagatgatggagaattctcagaactctacatcttcaagtggacatcactcttgatccctccaatgaccctactaatcatgaatattgttggggtggttgttggggtctcagatgccatcaacaatggttat

SEQ ID NO: 87514 - DNA, 246 bp, Glycine max
  Clone ID: 700909654H1
tgtagaaactgcgaaaatggcatcggagtcaggtcaaagtcccaatccttcttggtttacgcccaaaaggcttcttatgatattttgtctcattaacatgctaaactatgtggatcgaggagctatagccagtaacggtgtcaatggaagtcttgcaacttgcactgactctggaatttgtacaggtggcagtggaattcagggggattttaacttgaacattttcaagatggagttctgtcatct

SEQ ID NO: 87515 - DNA, 165 bp, Glycine max
  Clone ID: 700909658H1
ggcaagagcagcgccgacgattggcagagggtgtcttctgagcgcagggcatccatcgggaagcagatggctgatgctgggatcaagtacatccccagcaacactttctctcactatgaccaggtgctcgacgccgccgccaccctcggtgccgttccaccaagg

SEQ ID NO: 87516 - DNA, 240 bp, Glycine max
  Clone ID: 700909660H1
cttgtgatttgctcacaaaaccagtgtcggtcacaccatctctcccttttctccacctgcaacgatgtcggttaaggagtgccaccaccaccacaagggaaagaagcacaagctctggagacgcatcttctggggaatagtgatcttcgccttcatcgtgttactgacagttcttataatctgggcaatcctaaagccttcaaaaccaaccttcatcctccaagacgtcaccgtttacgg

SEQ ID NO: 87517 - DNA, 215 bp, Glycine max
  Clone ID: 700909662H1
ttagtaggaggcattcattgtcttagagaccatgttctgcagaccctagtccttagagctccattcagtttattgtataatcatctcattcaagtagcatcaggagttagaggacactgacatcatattccatctgataattcaatcagaaatctatgtaactgtgaactaatgtgagcatgtggctaaaatatgaagcgccaaaagtatatgtt

SEQ ID NO: 87518 - DNA, 238 bp, Glycine max
  Clone ID: 700909663H1
gtctctgtctcaatcctctttcgatcaaaaacccttagctcttctctctctcatacttacacacactctcaattcttgcacatcttccatcggcgttggcgtcttcattgaattggttaaaattgacatgaacggtggaaaaattggtgaattaatctcgcagagttttgaaaaatgccgggattagcgcaaaggaatgaacaccaacttactaatcgctcatccacgccgacgtgtt

SEQ ID NO: 87519 - DNA, 256 bp, Glycine max
  Clone ID: 700909665H1
cgcaaaccctaacctacttcttctatatcggcacctctatcccctgaaccctgttccatcttccaaccatggcgaaccaagacttcgaagagcgctcgcagcaaccgcaggagctagggtatgacccgaactttgtccccgactcggtaaaatcttttgtggttcacctgtaccgtcacatccgtgaaaagaacgtgtacgagatccaccagatgtacgagagctactccagaccctctcggaacgtctcttcaag

SEQ ID NO: 87520 - DNA, 254 bp, Glycine max
  Clone ID: 700909666H1
ttcatcatcatcatcatcattcagagagtgcatagaatgagttcttcttctggtcagagcagtggctatgatctttccttcaagatcttgttgatcggtgactctgctgtgggaaaaagtagcctccttgttagcttcatctccaactctgctgaagatattgctcccacaattggtgttgattttaagatcaagatgctcacagtaggtgggaagagattgaaactaactatttgggacactgctgggcagga

SEQ ID NO: 87521 - DNA, 248 bp, Glycine max
  Clone ID: 700909668H1
tctgtctcacctcacttgcgttattagggtttagtgagatagtggcggggtagtgacattacagtgtgggcataaaattttcaaagtcgaagcgagaacttgccatttcgagggttttagggttagggttttctcaaattgcaagaacatgggtttcaacagtcaaccctatgggattcagtccatgctcaaggaaggccataagcacctttctggcctcgatgaagcgggtctcaagaacatcgacg

SEQ ID NO: 87522 - DNA, 245 bp, Glycine max
  Clone ID: 700909670H1
tgtgaattggaggatgtcaacgttgaaagtgtcaaagaagttgatgcagtcagcacaagcgaacaccctactgtggtggtagctggttcacaagaatgtgtgattctacactaacaaggctctaaaattatgaacaaattcagcaaatccgtagtgctttaagaataattgctgaattgtgtcaccgtttaagtcacatagtattgtgctgtgcttgagccttaaggtcctgtgttgtatgtatt

SEQ ID NO: 87523 - DNA, 243 bp, Glycine max
  Clone ID: 700909671H1
ccccaccatcacgttctccttctacgctgccggcgagaacggcgccgtcgagagattctccagctaccgcgacaaggccaacgtcggcgccgactccttcacctcgtacgccaaagccgccaacgccgcagacctcggattctcgaactacggcaagtccttcaacgagggaaccggcacgttcaccacgtacgctaaatcctcggatggcgaaacaaaagtagggttcacttccgacggcgt

SEQ ID NO: 87524 - DNA, 248 bp, Glycine max
  Clone ID: 700908976H1
tgatgatgcaacctctcaatgctacagcacacgcatttattgcacacttcatcagcttgaaactcgctgatcatacttgcaagcaagcccccatccaatagcaatgccacctcaaatcaactttttagcatctccaagtccttcactatttatttatgctctcattgcattgagtgcctcaagtgtgcctttggggtgattctgtagtgttggaaatataaaagaggagtgtggactttaaaagggta

SEQ ID NO: 87525 - DNA, 247 bp, Glycine max
  Clone ID: 700908977H1
tttttctagcttttgctttgcttagattctgttctgcagagagagagagagagagtttcagaatttagagagagaattttattttgttttttcggttatctttattggtttctcttacatcgtttttgtaggcgctgaggaagaagctttggcagcataactttgttggggagcataaaattcaggcaagcccttgaagttggagagtattagatgggaatcttagaattttctctttagaccaaag

SEQ ID NO: 87526 - DNA, 268 bp, Glycine max
  Clone ID: 700908980H1
cggtattcggcttgagatcaatttcgatattgtaattactcaataattctcatcatgggctccttgattgttccaggtgcacatgatcagaaactaaagcttgtttctcgaccctttgtatcaacgagtcacctcattcccgtagtagacatagttaggctctttgacattcatggtgttgatgtcaccataatcatcaccataggcagtgccgccattttgcagagctctatcgatcgcgaccgtgaccgcggccacgctattagaa

SEQ ID NO: 87527 - DNA, 253 bp, Glycine max
  Clone ID: 700908982H1
aaaaaccgctctcttctccaacgctgtctgtcaccttaaaaaacaaagttccacttcatcagattcacctaaaccacaccattcgcatcaacacagcacttgtttgttcccaactccgaaaaatatcatgctcctaacgtaatatcctcggtttccccgttcaaccgcgatctcaaaaaacaaaactatggcatcactctcaggcatttgctcctcttccccgactctcaaaaaattcccaaaccaatcccca

SEQ ID NO: 87528 - DNA, 249 bp, Glycine max
  Clone ID: 700908984H1
gagaaagatgtcgaagcgtggtcgtggtggttcggcggggaacaagttccgcatgtcgctgggtcttccagtggcggcgacggtgaactgcgccgacaacacgggggcgaagaacctctacatcatttcggtgaaagggatcaaaggccgtttgaaccgtcttccctcggcctgcgttggcgacatggtgatggccaccgtgaagaagggaaaacccgatctgaggaagaaggtcttgccagctgtcat

SEQ ID NO: 87529 - DNA, 248 bp, Glycine max
  Clone ID: 700908986H1
ccggttcctccgtctccaacggcggtgccgctccaaactcgacgcccaccgccaccaccatcgtcgtcgcagactcctccgatccgaagcggcggcgcctcgagccagtcgaggagaaaaagccgccgccgacgccggacgactcgcggcggctgtttcagcggctgtggaccgacgaggacgagatcgagctcttgcaaggcttcctagactacacctcgcagcgaggatcctcgcaccacaacgac

SEQ ID NO: 87530 - DNA, 249 bp, Glycine max
  Clone ID: 700908987H1
aaaaggccacctataagagggccgtatgaccaacgaggaagcaatgaacatttttgaggagatgccagactatcaatcatcaacgcaagcccaattgtgctatttataatatttttatcaatggatttgggaaagcaggcaacgttgatattgcttgtgatttgttcaaaaggatggttaaggaagggataaggcctgacttgaagtcttataccattcttgtagaatgtctgttcatgactggtagag

SEQ ID NO: 87531 - DNA, 250 bp, Glycine max
  Clone ID: 700908988H1
ttcatatcatatcaattagatttgttttcagagtgtgctagtgagataccatggacaactacaacagcaatgacttttggaaattcagtgaccagttgaggcttgaatctggtttggccaatctgtctctgaatgattattccatttggagcaacagctacagctccaagaggcctgatcagaggaggaactttgatgtcaagggcagtgatttcaacaactcatcaaagccttttgatgatgatttcaa

SEQ ID NO: 87532 - DNA, 259 bp, Glycine max
  Clone ID: 700908989H1
tcggctcgagttcaaatccaaatggccctttacattacactaataattggcctcctagtagacaccctagtactctataagtagcatgtgcatgcaccttagtcttcaccaaaatactcctcttggcatcttgtagtgtgtccctctagtaagctatttccttctcttaacacaattggttgtgccaattgcgtgaggtcaccaaccaattaacaaaggtatatatatcatcatatcatcaccaaatgaaaaatattgg

SEQ ID NO: 87533 - DNA, 242 bp, Glycine max
  Clone ID: 700908992H1
ctctgaattcctcttattcaggaatttggagagtattgatatatcaaggtaggataaaccagtagtcaaggaagatatggagttttctatgattttcattgttagcaacattatgctgcttttcagttcagcatttgccaaaactgctagtcctccctctctgagcccaactccagcaccagccccggcaccagacttcgtgaacctcactgagttactcagtgttgctggtccgtttcaca

SEQ ID NO: 87534 - DNA, 247 bp, Glycine max
  Clone ID: 700908993H1
catttccctccccccactcccaccgccaacgccaaacaaaccctaaatctctctcgtcttcttcttcttcttcctccttcaaccatgagagagatcctgcacgttcagggaggccaatgcggtaaccaaatcggttccaagttctgggaggtgatatgcgacgagcacggcatcgatcctaccggaaagtacaacgacgaaggcaacagcggcatccaactcgagaggatcaatgtctattacaatg

SEQ ID NO: 87535 - DNA, 245 bp, Glycine max
  Clone ID: 700908994H1
caattggatgttatttagatctggattttttaaagatatgcaccagtgagttctccatggacgctgtcgtatcgtaattcgccaccacactgaccacctcccgtcctccgccgtgaagttcagcggtggcttttattttccgtttgcactgtgtcgcagcactgccgccactatcccctgtttcctcttccttcgccaacaacacaaacaccaacatcaaacagcggtggcttttttagttactt

SEQ ID NO: 87536 - DNA, 248 bp, Glycine max
  unsure (1)..(248): unsure at all n locations
  Clone ID: 700908995H1
tctttgcgcagttccctacctctcctttcaagatgcagatcttcgtcaagaccctcaccggaaagaccatcacccttgaggtggaaagctctgacaccatcgacaacgtcaaggccaagatccaggacaaggaaggaattcccccggatcagcaacgtctcatcttcgccggaaagcagctcgaggacggccgtaccctcgccgactacaacatccagaaggagtcaactcttcnnacttgtcttcgt

SEQ ID NO: 87537 - DNA, 251 bp, Glycine max
  Clone ID: 700908996H1
ctcgagccgaatcggctcgagaccaatcttctctccacgcccttcttgggtcaccgtctgaagtgcagcaatggcagatggattgcattcgcagcatccatcggtagttcagaagttatctggacagtcttatcttgtgtccaggcttgctcctaatcactccagaaactgttctaccactggtagttacttcaatggaggtttgcagtcttcaggtttggttccagtcgcggcacacgcgccggctgaga

SEQ ID NO: 87538 - DNA, 275 bp, Glycine max
  Clone ID: 700909002H1
aagaaaaccattgatggcactccctcactccatctctgccttagccaccacactcacactctcctcgccaacaaccaaaccccagaaagttaacccctttccctttttctcgaaccaaaagacacgatttttaacgaaacaaacgcgacccagaagcagaagaagcctctccctaacccctgcacgcgttgcggcgccaccctcaactgttgaagccgatcaatcatacccggagaccgaaaataacgaaactgaggaagagtttaacgatgaaa

SEQ ID NO: 87539 - DNA, 270 bp, Glycine max
  Clone ID: 700909003H1
tgcagagtgcagagccttctctcctctattttggcttccaacctttttgctccattcattctcaacaacaaaccaatctctatattttgcttagacaatgagggggagcttgtggcaacttgggcaatcgatcactcgccgtcttgcccatggagataagaaggctgttgctcgccgatgttttgcctcagaagctgagctgaaaaagacagtgtttcatgacttccatgttgctcatggtgggaagatggttccatttgctggatggag

SEQ ID NO: 87540 - DNA, 269 bp, Glycine max
  Clone ID: 700909004H1
ccttcccatggccgttgggttcatgttgttgtacacaaagttgtccaatgttttgtcaaagcaagctcttttctacaccgtgattcttctattcattgctttctttggggctttcgggtttgtgttgtaccctctcagcaattatattcaccctgaggcatttgcggacaagcttctcaacatcctcggacctaggttccttgggccccttgcgataatgagaatttggagcttctgtttgttttatgtcatggctgagttgtggggga

SEQ ID NO: 87541 - DNA, 262 bp, Glycine max
  Clone ID: 700909006H1
taaaaatttgaacaatgtggttgtggatgacagcaacaacactagagtagcgtctaatcatggagagaatggatctcaagaagtagatcctcaaattagacaaaatagtacttcacaggatttgccagaaccacattcacacagagataaaatgtataaagctgtatatagaagatcaagatcacatagggctgtgactaatttagctgacagtagtggccagggagaatccaattcaaatgggagacacagtaatttcaat

SEQ ID NO: 87542 - DNA, 261 bp, Glycine max
  Clone ID: 700909007H1
cggctcgagaattataagcatgggtttgtggaacacaacgaatgcagtgtcttgccgctttcacaagtttggtgatgaccaaaagaatctggtcttccaaggtgatgccacgtcttcttccaggggcatagaactcacaaagttagacggtggaggaaaaccagtgggtggcagtgtggggagagtgttatactcttctccagtgcacctttgggaaagctctacagtggtcgcaagctttgaaaccgacttcaccttttc

SEQ ID NO: 87543 - DNA, 259 bp, Glycine max
  Clone ID: 700909008H1
ggccggtgtcgaaaagtttgtacagaaggatcaaccgggtattagcagagctcttgtggctggagcttgtatggcttattgattggtgggcaggagttaaggtccaaatattcacagatcatgaaacctttcgtttaatgggtaaagagcatgcacttgtgataagcaatcacagaagtgatattgattggcttgttggatgggtttcagctcagcgttcaggttgtcttggcagcactctagctgtgatgaagaaatc

SEQ ID NO: 87544 - DNA, 272 bp, Glycine max
  Clone ID: 700909009H1
ggaattctgctcgagtccgggttcacgtttcacaatcactttttgctcttctctcactcactcactcttcttcttcctcttcgtgtggttttttttctcgaactcgaacgaagatgcgtgagattcttcacatccagggaggtcaatgcgggaaccagatcggagccaagttctgggaggtggtgtgcgcggacaccgggatcgattcaacggggaggtaccaaggggacaacgagttgcaactcgagcgagtcaacgtctactacaatgaa

SEQ ID NO: 87545 - DNA, 255 bp, Glycine max
  Clone ID: 700909010H1
ctagacttagctattcttacctcttggcatgaccattcaaatgtgctcttttctcttagcttctcttgctgttttctttttcttctcctccttggagaagagttttgcctttcaagcagcaagaaaggaggacacagaaagcaacaatcttcatcaatatactcatcttgttcacctcagctcactccttccttcatcttcttgcagctcttctaccaaaggtctcaaaacaaaagcatcattagaagtggtaca

SEQ ID NO: 87546 - DNA, 252 bp, Glycine max
  Clone ID: 700909012H1
caactgtttatttgtcagcaggaactgcaacagctttgattcttataggaggggagaccatgaaactgttcttccaaatagtttgtggtcccacttgtacttcaaatcctttaaccacagtggaatggtacttggttttcacttctctatccattgtcctgtctcagcttccaaacctcaattcaattgcaggactctcactcatcggggcagtgacagccataacttactccaccatggtttgggtactct

SEQ ID NO: 87547 - DNA, 253 bp, Glycine max
  Clone ID: 700909013H1
ttcgattctcttctctgcaactatgcctaaccctaaggtcttcttcgacatgaccatcggcggtcaacctgccggccgcatcgtgatggagctctacgccgacgtgactccgagcaccgccgagaacttccgcgcgctctgcaccggcgagaagggcgccgggcggagcggcaagcccctccactacaaaggctcgtccttccaccgcgtgatcccgaacttcatgtgccagggcggcgacttcaccgccgga

SEQ ID NO: 87548 - DNA, 254 bp, Glycine max
  Clone ID: 700909014H1
ttaaacccttcaaattttccaccgcaaaactgtttcatagcatgccaccaccgtttccacacacctatctatacagcttctaaatttctctcctttccttgggggaactgctcggttactgaaaccatcatctgggtcgcgaagattttttggaaaaaaaaagaaagtttaataatctccgatggcttcggctgctatcttctcgtcgctacggcggcgccggtcgccgtcgctggaggcgtttctggcgccgg

SEQ ID NO: 87549 - DNA, 253 bp, Glycine max
  Clone ID: 700909016H1
gtgtgattctacactaacaaggctctaaaattatgaacaaattcagcaaatccgtagtgctttaagaataattgctgaattgtgtcaccgtttaagtcacatagtattgtgctgtgcttgagccttaaggtcctgtgttgtatgtatttgcttttatctgcctttatgacgcgatcatgtgaaagtacgatgtaataactgctcacctgagtactgttgttggtgttttggggtatgatgtatcataatgctt

SEQ ID NO: 87550 - DNA, 270 bp, Glycine max
  Clone ID: 700909019H1
aaaatgggaggttctcgactatccaagccaaagtctggctccgcttccggcagcacaaactgtttcatgctgtatgcgagagcactctcaattacctggggagacactccagaatattggatatgggtacaacagaaagaaacaagtggcacgatagtagagttggctaagttgaaaagggtttgctggctagaagtgcatggaaaatttgacacaagaaagctttcactaggaattctatatcaagtgtcatttctaattatgttggaa

SEQ ID NO: 87551 - DNA, 264 bp, Glycine max
  Clone ID: 700909020H1
gagtgagtgagtgagagaaggagattctgatttgatctcgccttaatctctcagatctgagcttgccgtcgtcggaatccaactcaatctgggtcggattcttaggtatcaccgctccactattagtttaagcctctcaataaaaggtttttatttcgcttcaaattcgaggtttgatttgaagttggaatagcttaactgttgtgtaaaacagccagcacacacaagcatgggaagccaagacaacaacgtagcattgtcatc

SEQ ID NO: 87552 - DNA, 201 bp, Glycine max
  Clone ID: 700909021H1
tacaaccaccacaatcgctcctctactcttctgtacctgtgcttgtctcatcttcttctccgcttcattgtcagaagcaacagtagttggttatggctacaccatctcaactgtcaacaattatcccataaagaattctttgactgcaaaccttaacctcatcaaatcctcctctgtttccggacccgacattccacacct

SEQ ID NO: 87553 - DNA, 258 bp, Glycine max
  Clone ID: 700909023H1
ggctttgatttcgcttccgaagcgacaagcagcacccactctctcttctcggaccttccaaacatggaacgcatcgttggcggcaagtacaagctcgggcgcaagatcggaagtggatccttcggcgaaatctacctcgcgacgcatattgataccttcgagatcgtcgccgtcaagatcgagaatagtaaaacaaaacatccccaactgctttacgaggcaaagctctacaatattcttcaaggaggaagtggcatt

SEQ ID NO: 87554 - DNA, 225 bp, Glycine max
  Clone ID: 700909024H1
caggttgttcaccagtttgagttgttggatctcctccactgcttcttctcctgatcctgttctgtttcaaatttcaacccaaggagcttgggaacaaactcctgctccttcttctccttggtcatagaggcaccatttttggtttattgataggcaatgggaggtgcactgggaaagagtgaatcacctagaaagggatcgatgccagaaactaagctcgaggct

SEQ ID NO: 87555 - DNA, 253 bp, Glycine max
  Clone ID: 700909026H1
gctgaacgtaataatgcaattttggaacgagataatgcaattgcaactcttcagtatcgcgaaacctctttaagtagtggcagtatgccatcatgccctccaggatgccaaatttcacgtggtgtgaagcatatacatcatccccagcaacaggtacaccatatacctaacatgggtgatgcctcttacagcacacgggaaatgcacacaaccgatgccctccctgcagcccccatcccttctgaggccggga

SEQ ID NO: 87556 - DNA, 252 bp, Glycine max
  unsure (1)..(252): unsure at all n locations
  Clone ID: 700909028H1
gaaaaaacgcacagctccagcgcagaggagcaggatccgacccggcgccacctggatcccccacccgggttaactgctgaagagttcgaggacctcaaaccctccgtgctggagcaccacacctactctgtcacacccacccgccaaagctcctccctcctcgcgcaggcnatccacgcgccaccacacgcggtgtggtccgtcgtgcgctgcttcgacaacccacaggcctacaagcacttcatcaagagc

SEQ ID NO: 87557 - DNA, 249 bp, Glycine max
  Clone ID: 700909029H1
cggctcgagataaatagttgctcagatccgtgttactctccccagacccaattgcgtcaaattcacgatgatcaccatcatgatggtcgccgacaccgtcgccgtaaccgccgccaaaggcctcggcgtccttcgggcctatcaatccacctgtaacttttccgtcgccgatcagatctccgccatgattcagacttacgacgccgtcgcgccgccgccggtcaagcctactacctacaggctaagacg

SEQ ID NO: 87558 - DNA, 252 bp, Glycine max
  Clone ID: 700909031H1
aagaagaagaacaacaacaaagagatagagagagaaatagagggagagagagagagagagaaaagggtacattttgatgtttgttaaccatagaggcaaaacccaaaaagcatcttcttcatcttgatcaaagtccaaacctttgtacccttttgtgtatccctcccatttttgtgtcacaacacaatccttaaccacacaaaatccctcccatttgtgtgcaagagggtatttccctctatttgttggggg

SEQ ID NO: 87559 - DNA, 253 bp, Glycine max
  Clone ID: 700909032H1
ggaattgttgtaactttttgattcctagattctctaaaattcgaaattctaatgtcgttaggggaaagagattgtttgtgtgtgagtgagtatggctggaaaaggcgagggtcctgctatcggaatcgatttgggaacgacgtactcttgcgtcggcgtgtggcaacacgatcgtgttgaaatcatagccaacgatcagggtaacagaactaccccatcctacgtggctttcaccgagcacagaacggttgat

SEQ ID NO: 87560 - DNA, 273 bp, Glycine max
  Clone ID: 700909034H1
gagtgaagatggggtcagaggtgtctaaacagatggagcgaagaaagacaatccagacagagaagaagagtctgtccgatctgaaaagcagcggagaagactaccctggctccgactaccgtccccaagacagaaaaaactggatgtcccatctcgaccctcagaaactccgcatcaaccaaatcgtctggcccggcacccacgactccgcaaccaacaaaattggcatccctctcctcactcgccccttcgcccagtgccaatccctctcca

SEQ ID NO: 87561 - DNA, 258 bp, Glycine max
  Clone ID: 700909039H1
tggttgacaatgcatgatgccccatcatctgctccacctgctggaagtcagcaaaatggggtgaatgttgctgagttaatagttggccgtggctttggaactgtcattagacatcgtgactttgaagagagatctaactattatgatgctcttcttgctgctgaatcacgtgcaatttctggaaggaaaggcacccactctgccaaggatcctccagtgatgcatataactgatttgaccacggcatcggctaagaaa

SEQ ID NO: 87562 - DNA, 248 bp, Glycine max
  Clone ID: 700909043H1
ctccttttagcaagttaacaacacttttgtcttcgttccattatctagttctcaattctcttcaccctttgcctctgaaagaaatgggtagtcttgaagcggaaagaacaacagtaggattggcagcaagagacccttcagggattctctccccatacacctacaatctaagaaacacaggccctgatgatgtttacattaaagttcactactgtggaatttgccattctgatctccaccagattaaa

SEQ ID NO: 87563 - DNA, 249 bp, Glycine max
  Clone ID: 700909044H1
gttcatctgcacttgtagtggaaaagcactttttcttaatttggtgatggaatatgttccagactcgatacatagactctggaacatattccatcaccaaattaagaaaaagttccagagtctatgtatcgagtctcaaagttctatagtaatactaatcagagcatgccacttatttatgtaaaactttacatgcgccagattttcagggggctggcttatatccacactgttcctggaggttgccac

SEQ ID NO: 87564 - DNA, 248 bp, Glycine max
  Clone ID: 700909046H1
cttttccgtgattggaatattggacaggccaagtccacagttgctgcttcagctgctgcagctataaatgctagttttaatattgaagctctacaaaatcgagttggtactgaaactgagaatgtgtttaatgataccttctgggaaaacttgagtgtcgttgtaaatgcactggacaatgttaatgcaagactatatgttgatcagagatgcttgtatttccaaaagcctcttcttgagtctggaac

SEQ ID NO: 87565 - DNA, 266 bp, Glycine max
  Clone ID: 700909050H1
ctcccctttgccgctgttgttgttgctgcaccaccgaacaacttcccctgtaaatcgcgtttcgtttgtgcaaggttttaaaagatggctgatgctgaggacattcaacctcttgttgttgataatggaactggaatggtcaaggctggttttgcaggtgatgatgctcctagggccgtgttccccagcattattgggagaccacgccatactggtgtaatggttgggatgggtcagaaggatgcttacgtgggtgatgaagccca

SEQ ID NO: 87566 - DNA, 264 bp, Glycine max
  Clone ID: 700909052H1
gcagcagggagctctgccgcctccaacaagacagagttcagaacacaaaccctcgaaccgaacgtttttgagggttgatagagcacgatggttcagtacaattttaagaagattaccgtggtgccaaatgggaaggatgtggtcgacattatcctctctcgcacccagcgtcagacaccaaccgttgtgcacaaaggatatgcgatttcacggctgcgccaattctacatgcgcaaagtgaagtatacgcagcagaattttcac

SEQ ID NO: 87567 - DNA, 261 bp, Glycine max
  Clone ID: 700909053H1
caaaaatgtcgaagttaatcttcgtgttccttgcactaattcctcttctctgcacctccttctcgccagagaaaccctcagatcggcgcatcctcgttttgctcgatgacttcgccatcaaatcctctcactctctcttcttcaactccctcaaatctcgcggcttcgatctccaattccacctcgccgacgaccccaaaattgcgctccagagatacggccagtacctctacgacgccctaattctcttttcccccacca

SEQ ID NO: 87568 - DNA, 251 bp, Glycine max
  Clone ID: 700909054H1
agggaccctaaattgcagtgggacctagagaggccgagcgagagagcgagggagcatggaggagggaaaatggagagagctgaagcaattcatagagatatgcaagtccaatccctcacttctccacaatccatctctgtgattcttcaagacttatcttctcagcctcggtgctcgcatccctccccaacccaaaacggaaccaggtgattttgatgacaagtcagatctcctttatccgcacaaaatga

SEQ ID NO: 87569 - DNA, 253 bp, Glycine max
  Clone ID: 700909056H1
catggcccgaaccgcccatacgtcgtcgtttgggtcgacccaagcaacaagctctcgacgcgcgtggacgaaagcggcgacactgacgcgaattgggaccaaacgctcacaattccgttgccaccaaagcctctcgaggatcaaacgttgtacatcgacgtggtccacgccggctcggaggaggacaccaagccgcttatcggctcggctcggctcaagctggtggacattctcgacgacgttggaatcggcg

SEQ ID NO: 87570 - DNA, 113 bp, Glycine max
  Clone ID: 700909060H1
aagtttttgagatgttgtcaccccgtcttctattgctatgcctaactcttccgttgtgtttggtgtccttcttcaaataccgtaaaaccttcaagaatccaccacttccacac

SEQ ID NO: 87571 - DNA, 245 bp, Glycine max
  Clone ID: 700909061H1
ttcagcttttccctcgttgaaatgaaaatgggttcttctttgtggactttgtgtctaattttggcttcactagcctcttctgcattctgtgcctttccacggaggccagtggatgttccattcggcagaaactacgttcccacttgggcttttgatcacatcaaatacttcaatggaggttctgagattcaacttcatcttgacaagtacactggtactggcttccagtccaaagggtcatactt

SEQ ID NO: 87572 - DNA, 243 bp, Glycine max
  Clone ID: 700909062H1
cgagcattcaccattttcttgtggtttggtttcctagagacactaagtactcccatggaacaaaacaactaaagccttgggtcttctaaattcttatgttgatgcccgctgatcaccttgatcagcatcattgttgctccacaagcgggagcagcacgagcattgttcgtgtatggcgattcgcttgtcgactacgggaacaacaatttcttggccaccacggcgcgtgccgattcatatcct

SEQ ID NO: 87573 - DNA, 260 bp, Glycine max
  Clone ID: 700909065H1
gaacaactttacagcaccagttggagcacgatccagcactacagtttgcgcagttgctgagcctgataggcctctgtggttcccaggcagcacccctcctccatggctagatggcagtttgccaggagattttggctttgatcctctaggtcttgcatctgatcctgagagcctgagatggaatgtccaagcagagcttgtgcactgcagatgggccatgttgggagctgctggcatgttcatcccagaattcctcacaa

SEQ ID NO: 87574 - DNA, 263 bp, Glycine max
  Clone ID: 700909066H1
ctgcttagtggttggttaactctatcaaccccaaatgctattgattccaccatttccattcactacccaaatgctcttcacagattccctatttctctcttcttcaactttctcaggtattcgaagaaagaattctgggtgtattgaaagtttgaatcttttaagcctctaaatttcctccatacatttacctgcatttccaaattttgaagtttggatacggtaataatcaaaatggcctcttgcgtgtcaacaatttgtgc

SEQ ID NO: 87575 - DNA, 263 bp, Glycine max
  Clone ID: 700909067H1
accgcggctatgtcagaaatccttggaaaccccgttaacctcagatgcgcaaccaggtctgctccatcaccaactacacctgccaccttcaagaccgtcgcacttttctccaagaagaagccagctccacctccaaagaaaaagcctgccgctgtatcccccgccaatgaggaactcgccaagtggtatggtcctgacagaaggatcttcttgcctgagggtctcttggaccgatctgagatccccgagtacttgaccggaga

SEQ ID NO: 87576 - DNA, 263 bp, Glycine max
  Clone ID: 700909068H1
atcaagatctctctctctgtaatcgaaaatgagcaagggaccgggtctctttaccgatatcggcaaaaaatccaaagatcttttgactaaggactacaactccgatcagaaactcaccatttcctcatacagcatctccggagtggccctcacttcaacatctgtcaagaaaggaggactctccactggggatgtggcagcactgtacaagtataagaacactattattgatgttaaactggacaccgcatcaactatctcca

SEQ ID NO: 87577 - DNA, 258 bp, Glycine max
  Clone ID: 700909069H1
gcagaggactaaaggtccagtgacccctgtaagggacactaatggaggcactgaacgcaggctcttgcaatatgctgcaatgttcatgtcaataaggccacatgaccaccttgaatgaaaactggtgtgtccatgatttttcttattgttgttggttattgatcctcaataaaattgtatttcaaatccattagacctgttgagcgtgaaatgtattaaaaaaaaaaaaacaacaaagtgagtacgagtaattgaaaa

SEQ ID NO: 87578 - DNA, 255 bp, Glycine max
  Clone ID: 700909070H1
ctttgatgacaaagggaatggtggcaaggagtggcggaaggccctcgagacggcggagtcacggtggaccaccgccacgacgtcgttgctgccgaagaggatgacaagccaaggaaaaagggtggtgaggtaattatcaatgagggctttgacttgaacgccgtcgcgccggaagccgcagagggcggtggcgcgtagagttaattgattggcgtctgggacgcacgcgctgtcggtataaccaccgtaagattg

SEQ ID NO: 87579 - DNA, 252 bp, Glycine max
  Clone ID: 700909071H1
gtgtctttcaaacccaaaaatcctcacttgggtctcaatccgaaagcgataggccacaaaagagggcctttacttccttacatactctcacttgcttgtggttccttggtcgttcatatttttgatatttcttcttcttcttcttcttcgttttgttcagtttctttcatggcgatctcggagaacgtgtcacctttgaagctgttgttatgttccaattgggttccacttgtggtttttgcctttgcttga

SEQ ID NO: 87580 - DNA, 251 bp, Glycine max
  Clone ID: 700909072H1
gagagtagtagagtaacgcaacccattccatttccctctaaaatggcgtcaagtaaaatgagggtcgaggagctgcgaacggagctcctccaccgtggactctccaccaccggaaccaaacccactctggtccgtaggcttgaagccgctcttcgtaaacaaacgacgagtgacggtggtgcttgttctcctcgtaggactagaaagagaacaacggattcgaaccactccgaagaaatcgaggttgcaga

SEQ ID NO: 87581 - DNA, 245 bp, Glycine max
  Clone ID: 700909073H1
aagaaagccccgaaagttgaaactgctcctgctaaagagaagcccaaaacacctcctgccactctgaagtctcccactgagccccagcttcctcctaaagagagagacagacgagttcctatgacaaggcttcggaaacgagttgctacacggctgaaagattcccaaaacacatttgctatgctgactaccttcaatgaagttgatatgactaatttgatgaagctccgttctgattataagga

SEQ ID NO: 87582 - DNA, 135 bp, Glycine max
  Clone ID: 700909074H1
gcgattgcgactctctcttcctacgataaccgtttcctctcgccggaaaaccgacattgatctctctctccggcgatccccgcccatccctccgccatgagttccggctgagctcctgccacatgactagcccca

SEQ ID NO: 87583 - DNA, 244 bp, Glycine max
  Clone ID: 700909077H1
attcaatttcaccctcctttttcatttttcattaatttagaatacaatgatgaagtatggcttacgtgcgtcattacgtttttcaattaaagtaaatttgatctcccctgagttgcctttctattaatttaacattccattagggcgtatagcccccacaaagtggaattctggattagaaaccaggataatgagatttgatggcactactttgcaatttcaaccttcatctattgcagtagtc

SEQ ID NO: 87584 - DNA, 245 bp, Glycine max
  Clone ID: 700909079H1
ggcaaacggacggcgggcgcacgcgtcgcttctagcccggattctgacttagaggcgttcagtcataatccaacgcacggtagcttcgcgccactggcttttcaaccaagcgcgatgaccaattgtgcgaatcaacggttcctctcgtactaggttgaattactattgcgacactgtcatcagtagggtaaaactaacctgtctcacgacggtctaaccccagctcacgttccctattggtgggt

SEQ ID NO: 87585 - DNA, 247 bp, Glycine max
  Clone ID: 700909080H1
caaggaagtcccctaatcagaaccagagatggacaccaaacccaccgagatcagcagcggcaagatgttcggaggttacaacaagagattcaagcatttcagccttaccctgggatgctccatgaacttccacatctacttccctccatctccttctccctctcacaaattccctgtgctgtactttctctctggcctcacttgcaccgacgagaacttcatattcaagtcgggtgctcagcgtgcc

SEQ ID NO: 87586 - DNA, 255 bp, Glycine max
  Clone ID: 700909081H1
acgctcaggcggttttgcgacagcatcttctgttggcgtatgttgaggagattggacgtgatgctaggcgtggtgtagaggggagggctaggatgaagttcggcgccttaggagcttgtgccttggctggtacagggcttcctattgatcgattcatgacttctgaagcgttaggatttacggctcccttgatgaatagtatagatgcagtttcagaccgagatttggtgctggagtttctttctgctaatgcca

SEQ ID NO: 87587 - DNA, 260 bp, Glycine max
  Clone ID: 700909083H1
ggttatcatttctccatttccattttctctctcacttttcaagaatcgtaagctatgggaaagtcttacccaactgtgagtgctgattaccagaaggccgttgagaaggcgaagaagaagctcagaggcttcatcgctgagaagagatgcgctcctctaatgctccgtttggcatggcactctgctggaacctttgacaagggcacgaagaccggtggacccttcggaaccatcaagcaccctgccgaactggctcacag

SEQ ID NO: 87588 - DNA, 259 bp, Glycine max
  Clone ID: 700909084H1
gaaagaatcagaaaagtcttgccctcatctttacatttatcaacacttagatcttttcatgcttctggagattatgggaatatggttagagaccccgtctctaacatattgcggtcttactttcaaatgttgccatgggagacacagaaactaaatctgattctgagctccacaccatcattcatttcctctgtttcaggcatagctgaaggtgctcgattgctgctttcccaaacatatcatggtgatagagttattg

SEQ ID NO: 87589 - DNA, 248 bp, Glycine max
  Clone ID: 700909086H1
ctcactcaccgccgggatgtcgccggagtccggagcacacgctcctctcctccagggatccgtcgatgttcctccggcaactgtgtccggtgccgtgttcaatgtcgccaccagtataatcggcgccggagtactgtctcttccggcgattctcaaggtcctcggcgtgattccggcgttggtgctgattctcgtgattgcgtgtcttgccgaactatcggtggagttcctcatgacgttcacgcgtg

SEQ ID NO: 87590 - DNA, 251 bp, Glycine max
  Clone ID: 700909087H1
caacatgataaacatggacgacacatgcgaacttgttgccaacaataatgttggttttccaactgatgcagctaataacggtatccataaaccttctttgttgggtgccaataagaccacccttggccaccacgttgcacggcgtctagttgaaatcggtatcaaagacgtattcaccgtccctggagatttcaaccttatccttcttgattacttagtagcggaacctgagcttaacctcataggttgct

SEQ ID NO: 87591 - DNA, 249 bp, Glycine max
  Clone ID: 700909088H1
tagctgataggatcaagcagcaacttgaggcaggtcaatttgttgatgcaacttactcatgggctgatcttgagaatgagattgtcgctagcagcaacaatgtggatttctataattttctacaagattcaaaaagtgattcggacaccttaaacgcaatggagctgggattattcaaagaagtatcaatgatgcgatactccaagtatcttagttcaaagacttcatatcttggcagtgaggatgatg

SEQ ID NO: 87592 - DNA, 246 bp, Glycine max
  Clone ID: 700909089H1
cggaaacaaacatgtcgtggtgttactgcgctaagcctatgactttgcagttgccgttgcaaccaagagcatcatcatcattccattcccacgttggaggagtaacagtaacatcctcaacactgtctcttcgactctcttctactcttgttttcacccacaacctccacttccaacccaaactcaaacgcgcttccacaaccgttcgatgctcctcggcattgactcctcaattgaagtctacct

SEQ ID NO: 87593 - DNA, 216 bp, Glycine max
  Clone ID: 700909090H1
gtttgtgggaacattatggagcccagattcgtaatctccgcatcggaggccgaatcccaatcaatctccaaactcctcccttccctcgtttcctcttctcagtccctcgcccgtccttccatctccaactttcccctcgccgccgtcggactcgccgcctccggccgcatcttcgtgggtctgaacgtggagttccccggcctccccttccacaca

SEQ ID NO: 87594 - DNA, 243 bp, Glycine max
  Clone ID: 700909091H1
gtcaccaccgctcaccattcactctctttttacccctaaaccattgaatcgatctaaatctctcccaaatcgcaaaccccttttgctcaattgagtcaattctctccctaagttcctctgtcggcgtctgggtgggtaaaagttgttgttttgtcttctgggttttggagcaaagacaaaagatgggtgagggagaacgtttccagcttgggactgtgggtgcgttgactctttctgtggtct

SEQ ID NO: 87595 - DNA, 243 bp, Glycine max
  Clone ID: 700909092H1
ggtggggtgaggtaagcaaaacccacccctgacccgtcccgttgccatgcctactaagggtgcaaggtcgaggaaagactattgaaattgaaaggaaaacaatagtattattaatttatttatcagtcattcactttgttattacaaaggttatattgtgtatatttatacacataactctaatggtcataaacataattatgaaagcagaattatgtacttaatggtggtatatttggtttg

SEQ ID NO: 87596 - DNA, 244 bp, Glycine max
  Clone ID: 700909093H1
aaaatcggcactcatgagttattattagggtttgcaacctttaaactctgaagctgcaatagtacagcacagaatggggcgcaaagagaagcagaacgcgaaggcaatagatgaggaacacgacgtagtaaattttaacggcgcttcaacgccgtccctcgttttcagcagcgacgacgatgaagccaaccaagatctcagcctcaagatcgtcgaaaaggccatgcgaatccgcgccgccaaa

SEQ ID NO: 87597 - DNA, 256 bp, Glycine max
  Clone ID: 700909094H1
ggaattctgctcgagataaggcaatgaatctgatgcaggcggttcgctacgacgcctacgggggaggtcctgccggcctcaagcacgttgaagttgccgttcccagtccaaaggcaaatgaggttttaatcaaactggaagcagttagcattaaccctattgattggaagattcagaagggtcttctccgtcctttatttctccccagaacctttccccacataccgtggacatatgtggctggagaaatagttga

SEQ ID NO: 87598 - DNA, 242 bp, Glycine max
  Clone ID: 700909095H1
tcatgaacctttttttccttccttttttttattcaataattaacggtgtgagctacacagtatatgaataggcaatttctttctttctgtaaatctcctacccagttttctcctaatgaaaattaatcttgacttagaaattgaagtatatttagtattcaatcatttaacttctcttaatctttgaccttcttctttggaaggagctagtaccatgcatggttgtctactttgtcttctat

SEQ ID NO: 87599 - DNA, 244 bp, Glycine max
  Clone ID: 700909096H1
cacaacactattcttcttcgcagcaatggcgctagtggatctggacgggaaccccatgaaggcacttacgatctgcatgatcggcgctggcggcttcataggctcgcatctctgcgagaagctcatgtccgaaacccctcacaccgtcctcgccctcgacgtctacaacgacaagatcaaacacctcctcgaaccctccgattccccctgggccggccgcatcaccttccaccgcctcaacatc

SEQ ID NO: 87600 - DNA, 251 bp, Glycine max
  Clone ID: 700909101H1
gaaatacttgctgaaattagagatgcggttttttcatttattcgtaaaatggaacctaggcgattaatggataccatgcttgtttcccgtgttagaatcttgtatataagatctttgcttgctagatcaccagagttgcaatccattaaggtattgccagttgagtgcttcttgaaaaggccaacactggacccagtagaagttccagccgagcaagcagtcctggaagatcttccatgcaatatgttgat

SEQ ID NO: 87601 - DNA, 250 bp, Glycine max
  Clone ID: 700909102H1
cgagaaaagcagcatactgagatactacgtatactacgtagtactacacatttcatttgcctcttgtagtagccatggttttccaaacaaacattaatcctcacttcgtattgtttcctctcatggctcaaggccacatgatccccatgatggacattgcaagactattggcacggcgtggtgtgattgtttccatattcaccaccccaaaaaatgcatcacgattcaattctgttctttctcgtgatgt

SEQ ID NO: 87602 - DNA, 253 bp, Glycine max
  Clone ID: 700909105H1
ctcaatctgggatacgaagcttgcaatagctgcagcatctgaataggaatggattatatctgtctttttgtcaccttcactgcgattgcgctcttagggtttgtctttgtagtgttttttgaagcatataaaagaagaaacaaccatcagcatatcgaagttccggctatttttgaagatcctagctcattgaaacaggttccttgcccacatattgttgatccagccacaaagtatatttctttgattatcc

SEQ ID NO: 87603 - DNA, 250 bp, Glycine max
  Clone ID: 700909106H1
gcttgttttcattgcatgatcaaccgccgagaaggcagacccttgatcagattggatctggtgtgaacagtgttgcaatgagtgatcgctctgagttggtaattggtcgaccagaggcagtatatttttatgaagttgatgggcgtggtccttgttgggcttttgagggagagaagaaattgcttggatggttccgtggataccttttgtgtgttattgcagatcaaagaacaggcaagcatactttcaa

SEQ ID NO: 87604 - DNA, 253 bp, Glycine max
  Clone ID: 700909107H1
gcattgactcatctttttgatttggatcaccatggaacataaattagcaacaactgaaggacaacccataagatgtaaagcggcggtttgtcgcaaagctggtgagccactgggtattgaggagatcatggtggcgccaccaatgcctggtgaagctcgcattcgtattatatgctcctctctctgtcgaactgatatcagtttccggaacatgcaggggcctccggcgaatttcccaacaattctgggtcat

SEQ ID NO: 87605 - DNA, 253 bp, Glycine max
  Clone ID: 700909108H1
acgattgttgcaattgtggttccaattacggtcgctgtgcttatatttatagtcggaatgtgtttcttgagtagaagagcaaggacgaagcagcagggttctgtaaaggaaggaaaaactgcgtatgacatccccaccgtggactccttgcaattcgatttcagcacaattgaagcggccacaaacaagttctctgccgataacaagttgggggaaggtggatttggtgaggtttacaagggcactctttcaa

SEQ ID NO: 87606 - DNA, 251 bp, Glycine max
  Clone ID: 700909110H1
gaacgaatcgaaaaaagaaagatcatggcgatggcaaacttggctcgacggaagggttacgccgtcgttttgtcgtcgaggtcgtcgctttgtctgacaaggtggagggggttcgcgtccggatctgacgaaaacgacgtcgtggtcatcggcggcggtcccggcggctacgtggcggccattaaagcggcgcactgggtctgaaaaccacttgcatcgaaaaacgtggcactctcggcgtcacctgcctc

SEQ ID NO: 87607 - DNA, 250 bp, Glycine max
  Clone ID: 700909111H1
tgagggctaataaagatgttttcgagagtatgaggaaaaacccaaaagtaaaatatgatggggaaagattctcttacaagtcgaagcatgccgttagggacaaaaatcagctgcttttcctggtacgtaagtttccagagggcattgctgtggttgacctaaaagattcttacccaaatgtgatggaagacttgcaggctttgaaagctgcaagggagatttggctgttatccaactttgactctcaaga

SEQ ID NO: 87608 - DNA, 250 bp, Glycine max
  Clone ID: 700909112H1
cgctcttcgttatcttttctcagactccgcggcgtagatccgaggagttcgggaaatcctaactcatcatctcaactcaagtcatggctggacttgcacctgagggatcacagttcgatgctcgtcactatgattctaaaatgagtgacttactttcatctgatggacaggacttcttcacatcctatgacgaggtttatgatagttttgacgctatgggtttgcaggaaaatcttctcaggggaattta

SEQ ID NO: 87609 - DNA, 249 bp, Glycine max
  Clone ID: 700909113H1
tttctctttctgctttgctagttcatgtcatggcgtttctgaaccctttctctctccacattcccatgtccttgttgctcttcctcctcttctttttttgcttctgcaaagccagtactactactaccacctctactacaacaaagtcactgtccccttcttcttcaccctccaccactacttcctcctctgatgttcaacttctcttgggaaagatcaaagcttcactgcaaggtagtaactctgaca

SEQ ID NO: 87610 - DNA, 250 bp, Glycine max
  Clone ID: 700909114H1
tactcctaacagtaatagcagagagagagagagagaggcttaagacagagcactgtctgagtgaaacatccattctcttcctcctcctcgtgattcccgaacattctcttcttattcccagctccacgcgcgcgactccatattctcaccactcgcgccattcttcttcttcctccattagggttttctcacattgctgaatgtagcttcgctctcacattgacccttgaaaccacaatgtccggcccgc

SEQ ID NO: 87611 - DNA, 251 bp, Glycine max
  Clone ID: 700909116H1
caaatggcttcagcttctgttcccatggcgttgtcactgagctctgttaccaacaacaacaagccttcatccgaagccttcttcaggccactacccctacgccaaccaaagaggaccctcttcaccacgaaggcagtgtcaaactccaagcctcaaatcaatgcagctttgaaggagaaggcagttgccggactcacagcagcttctgtgacagcatctatggtggttccggaggtggctcatgctgctgg

SEQ ID NO: 87612 - DNA, 248 bp, Glycine max
  Clone ID: 700909118H1
ctcgagccgacgaaagtgtttagctttctctgacttacatcatcacttgctcgctgtgatactatctaacaaattcttcatttcattgttcatacacactcgcacctaactccgccatggcttctcttcccaccactttcgctataaccaaatctgcatcctccataaacaaggtggaccactctctggtcaagatcaaaccatacaacttctctctcaatctaaatcgtcaagggaccatgcaaaca

SEQ ID NO: 87613 - DNA, 250 bp, Glycine max
  Clone ID: 700909119H1
ggctcgaaacatcgctacccgaagcatacttgtgaaggggatgtatgagctgtagggtgaagggagtagctatgaggagttgaaggagtctgtgttgaattaccctgatgaaaggaagttgccgtacttggattctgatagcactttcaagataaccgttgattgcattgggaaggtcattagcttggaggagcaaaaggagctcattcaagggctctcttatatccctgtcaagggccgagtaaagttg

SEQ ID NO: 87614 - DNA, 247 bp, Glycine max
  Clone ID: 700909120H1
caaaaagcagggaaaaaagcaaaatgactctggtttgaaaaaagctgtcttgttaagtggaactcctggtataggaaaaacaacttcagcaaagttggtctgccaggagcttggtttccaagccatagaggtaaatgctagtgacagccgtggaaaagctgatagcaaaattgaaaaaggaattagtggaagcaaaacaaattccgttaaggaacttgtaaccaacgaggccattagtgttaatatg

SEQ ID NO: 87615 - DNA, 253 bp, Glycine max
  Clone ID: 700909122H1
cagccatcactaatcagcactagcgacagccatgggagaggtagacacagctttcatccaagaaccagaacacaggccaaagctctctcccaaccaagcagaaggaattcccataattgacctctctccaataaccaaccacgcagtttcagatccatctgccattgaaaacttagtgaaggagatagaaagtgcatgcaaggagtggggtttcttccaagtaaccaaccatggggtgcccctcgctctaagg

SEQ ID NO: 87616 - DNA, 252 bp, Glycine max
  Clone ID: 700909123H1
caaatccattctcacgtcacggcacggcacagcagcattcaaccttgtactcaaatccaagtaacgatcattacagacagttaccaccttaacatgcaatatcatctctgtctaaagcaaaagctgccatttctcactctctcagtccatcatattcgcccattcgggtgtaacagatagataaaaaaaggtattttggtaaaagggaggaggaggaggagaaaaaattattcgtccaagtttcaagtaatc

SEQ ID NO: 87617 - DNA, 251 bp, Glycine max
  Clone ID: 700909125H1
aattcgcagagcaactcaacacaacgaaccaaaccaacaatgtcgcagccgcagcctcagtcgcagccgcaacacgggccagcggcgctggagcaggtgcagtgcttcggtcgcaagaagacggcggtggccgtgacctactgcaagcgcgggcgcggcctcatcaagatcaacggctgccccatcgagctcgtcgagccggagatcctccgctttaaggccttcgagcccatcctcctgttgggaaagag

SEQ ID NO: 87618 - DNA, 251 bp, Glycine max
  Clone ID: 700909126H1
gcatcctaatctcgctcagattttctccagaaaagggaaaataaataaaaaaagagaataataataataccttttgtaattcgcaaaacgtgatcgacgctggcgcaaattgaaattaggaattagggttagggttttcattatcttcgcccggaaaagaaaggggggaagaagaaagaaccgttcctttatgatcgaaaaggtgcctttggtcatcatcgcggtgttaatcttggtggtgcaatcctctg

SEQ ID NO: 87619 - DNA, 250 bp, Glycine max
  Clone ID: 700909127H1
ccatcacagtcattcagacagtgcacctacaaggagtttagtttcatttgctcaagattataggaaactggcaattgattgccttaaggttttacgcatagagatgcaattggagacagtattccatatgcaggaaatggcaaatacagaatacttggatgaccaagatgctgaagagccggatgacttcatcatttcgctcactgcacagataacacgaagagatgaggaaatggctccttttatttca

SEQ ID NO: 87620 - DNA, 251 bp, Glycine max
  Clone ID: 700909129H1
ccgccgccgtatatcgtaaaatcttctcctactgcctccccgccacctccagctccaccggccgcctctccttcggcaccaccaccacttcctacgtcaagtacacccccttctccaccatctcccgcggctcctccttctacggcctcgacatcaccggcatctccgtgggcggcgccaaactcccagtctcctcctccaccttctccaccggcggtgcaatcatcgactccggcaccgtgatcacccgc

SEQ ID NO: 87621 - DNA, 250 bp, Glycine max
  Clone ID: 700909131H1
gtttatcgcgttaagcaaaaaacccaatcaaaattcaaagtctctttgtttaccttgtttccctcattgctttgctcacattcaatttcgaaggcgtagagtgagatccgaacgatgaagagagtattcggcgtcaagaagaacaaggatccacccccttccattcaggatgcttccgaaaggattacaaaacgaggtgacacggtggatgacaagattaagaagcttgatgccgagcttagtagatata

SEQ ID NO: 87622 - DNA, 215 bp, Glycine max
  Clone ID: 700909133H1
gaagatgctcttgctgtatgcgtcacctttatgatgataacaaggatcctagtctttggttagtatgcacatctgaatttgctcaagggggggactcctgtgggttgtcttgccatattgaatgtgcccttcagcatgcaaaggtgggagtccttgatcatgggcaactgatgcggctagctcgtggctctggatgtgcatcatgcggtaaagtt

SEQ ID NO: 87623 - DNA, 249 bp, Glycine max
  Clone ID: 700909136H1
gtggagtaaaagagaacatctttccaggtgttggaaaacctggtggaaaattcattgccttatctcaagtatagctataaaaagtacagggttcgacacaagaagaatgataaaggagaagcaagagaaaagttccagtttagttctagagtagagacagaatacctgaagccctcttactctgctagcattggtgaggagcttgaagatgggctatttgatgatttcttagaattggccttgcagttt

SEQ ID NO: 87624 - DNA, 249 bp, Glycine max
  Clone ID: 700909138H1
aaagaaacaggctttatttgagcactttgggactctcaattctcagggttaccttctctatcagcttctgcagattagctggaagaaataaagaaagaaaaagataacaaaagttgttcaaaggccatggatgttgcacattttttgtttggaatctttgggaatgcttccgctctgttcctcttcttggctccagtgatcacattcaagaggattataaagaacagatccacagagaagttctcgggc

SEQ ID NO: 87625 - DNA, 241 bp, Glycine max
  Clone ID: 700909139H1
ggaagaggaagaagaagatgatcaacaacaacaacaacaacaagcaacacagcaacaccaactgaaacatcatcatcagaatcatcatcatcatctacgaccctaaattttttcactttctctctctctctctctctctctccctccctctctctgtctgtgtctgtgtctgtgtctgtgtcttttttttttttttttttaagtggggggaggggggggacataaagaatttgaaggaaac

SEQ ID NO: 87626 - DNA, 249 bp, Glycine max
  Clone ID: 700909141H1
atttcgcatcttctccttctcattccaactccaaaatacacacacacgatggaaaccttcctcttcacctcagaatcttgaaacgagggccaccccgacaagatctgtgaccaggtttctgatgccatcctcgatgcttgcttggagcaagacccagagagcaaggttgcctgcgagacctgtacaaaaaccaacatggtcatggtctttggggagatcacaaccaaggccaaggtgaactacgagaaa

SEQ ID NO: 87627 - DNA, 246 bp, Glycine max
  Clone ID: 700909144H1
gcataagatagagagtggtgtaggcgttaagatttccgtgaatgatattttgaagtaggattcttctgtggggcgaagataagtttctaaagccaacgggaaatgcaaggagcaagaagaaacagtgaatgtgactgtgaatgtgaatacgtgttcttacaatggtagtagtgcactttggtcagagagcaatgaagataacaaatcactagacatggaaacctcaagtagtggctactactctga

SEQ ID NO: 87628 - DNA, 248 bp, Glycine max
  Clone ID: 700909147H1
cttcttgtggttacaaaaactctgaaaaacacacacacacacacacttcttatgcctatggctggtgagcaaggtgatagattctcctccattaccataccccttctcgatgatgaaaaattgcaccaagtgaatggttcagatgaggctttggtggccaaaacttgtgatctacacacacctcatgtggataacacctcctttttcaagacctgcttccacctcattaatgccctctcaggagttgg

SEQ ID NO: 87629 - DNA, 246 bp, Glycine max
  Clone ID: 700909149H1
agtttgcagagggagaggctccggttcaatcaagcaatgaaaccatacatgctctccttcagtgcgtgccttatttgtctcaccaaaactgtactcgatgcttggagtacgctatgtccaggatttcatattggtgtgatggaaaaacaggtggttggtatctaggacgaagctgttctttaagatatgagacctacctcttctttgagctcatattccacgatgcaccagcaccacagccttccc

SEQ ID NO: 87630 - DNA, 245 bp, Glycine max
  Clone ID: 700909151H1
ggcagtgatagcaaagagaagatcatttcataatcagactcacctaactccgccatggctgctgttccctctactttcgctctaaccaaatctgcattgtccataaacaagctggaccactctctggtcaagatcaaaccatacagcttctctctgaatctaaaccgtctagggaggatggaaacatctttaaccagaaggcctctaacaattcaagccacatatagtgatggtggaaggcccag

SEQ ID NO: 87631 - DNA, 243 bp, Glycine max
  Clone ID: 700909152H1
ggagacgatgatgatgatgagctgcgtttcgatttcgagttcagtgacaagaggcgctattagcgtgggttcctcttcatctttgtgtttcggcacacccaagttgttcaattcagcaagggtagcggtgaatggtcggcgaagaaacaaaggtttgagttgcaacgccatgttcggtctgggggtgcccgaactggtcgttattgccggcgtggccgccctggtttttgggcccaagaaatt

SEQ ID NO: 87632 - DNA, 227 bp, Glycine max
  Clone ID: 700909155H1
ctctttctttcgctttctctctcttcctcgttcgcttctctccccgaaatggagcagtctctgctgagaggcgaaagccgtgaccagagtaaccggtcgcggggaatattccggcgctccgatgctatcacctacggctccaactacgagaaagccgctgcgttcatcgatctggctgaagatggtgttggtctccctgaggaaattctcgactcagcaaacttcca

SEQ ID NO: 87633 - DNA, 245 bp, Glycine max
  Clone ID: 700909157H1
attacaattactactttctctctctttgtaacttgtaagcatggagtcctcaaagatctatgcttacctcttcctttgcatgctcttcctctcctccgccactcccattctcggttgtggctactgtggcaaaccccccaaaaagcacaagcctggtaaaccaccaaagacacccacagtacccgttgttaagccaccagtcacaatccctcccattgttaagccaccagtcacactccctccca

SEQ ID NO: 87634 - DNA, 244 bp, Glycine max
  Clone ID: 700909159H1
tgagtcagcacaaggatcatcagatagcctttgtaccattgaaattaaggatgcgcttcttccaccttggagtatttgtggtatatgtgcattgatggcctctgaaggaagaagctttgtggcaagttttgtgacggaacctaactcaattggcttgaatgttgccttaaaatcaacttgtgagaagtcggaatctaaagctgccggcagtgaaagcttacaagaccaaggaagtacgtttggc

SEQ ID NO: 87635 - DNA, 102 bp, Glycine max
  Clone ID: 700909160H1
gtgaagagtgagagagatagagagagagaggcactttgaatccaaaaatgagatacatcatcagcattcacataggtcaggccgggatccaggttggcaact

SEQ ID NO: 87636 - DNA, 246 bp, Glycine max
  Clone ID: 700909161H1
attttgttcttccttacaccctaaatccctaatctccttcagcggtgtttatagtttaacccaaaaaatcaccgaattctgatcggatcaccgcagtgccccactctccaccaccgcgccatcgcaaaccctagatggacctactgaagcaagagcttctcaagaagcgccaatccctggcgcaagacaccggcggcaagaaattcttcaagcgctccgagatccagcagaaggaaatccagaaac

SEQ ID NO: 87637 - DNA, 244 bp, Glycine max
  Clone ID: 700909163H1
tgattttccctcttctctttttctctctcgtgagtctcgtccctgaagcgaaattctagaatggcggaagaagctcctgcatctgaaacctccgtcacaatgcctcaaccggcggaagtcatcaccgtcgacggaaccctaacctcttccgagaatgacaagagcggaatctccgtcgatgccgccgcgcacggcggtgaaaagacggtgtccaacgctgaaccttccggtagcgatcctcaga

SEQ ID NO: 87638 - DNA, 242 bp, Glycine max
  Clone ID: 700909164H1
atagttttgcattgttttacttaatctacaatggctgcttcaacaatggctctctcttcatcatcattggctggccaagctatcaagcttgccccctccacccctgagcttggtgttggaagggttagcatgaggaaaacagcctccaaaactgtttcctcaggaagcccatggtacggcccagaccgtgtcaagtacttgggcccattctctcgtgagcccccatcctatctcactggtga

SEQ ID NO: 87639 - DNA, 243 bp, Glycine max
  Clone ID: 700909166H1
ctccctcttctttccacccatttcccctttcctctctctctccaaaacccacttctttcaaccctcgccctctcttccctcgcaccatgcacgcctcgcgcatccaagatgccgttggaggggcactggccctcgtccaatcgtcccccgctacgtggcagtccgcgcttctcagcaacgcgctgatctttttcttggggtctccgattttggtcagcgggttgtctctttccgggatcggtg

SEQ ID NO: 87640 - DNA, 72 bp, Glycine max
  Clone ID: 700909167H1
gggttttgttgttgctgtcaatggatttgagatggtgattgggatttgagccaacaataaaaatatgattcc

SEQ ID NO: 87641 - DNA, 241 bp, Glycine max
  Clone ID: 700909168H1
aatacctccactacttgaaaaaaggaggacttttttgccctcaaagccttttgttggtgacaatcggttccttttgccttttgtcaccttcggcttcctccctgttagtaaaattgatcataatccataaggaggacgaaaaaggacacagacaatccagatgtgacagaattaacacaaagcacaaagcattgtgttacatcaaatcaaaccatctgtgcccttacgatctttctgctac

SEQ ID NO: 87642 - DNA, 245 bp, Glycine max
  Clone ID: 700909169H1
agtgaaagagaatccgaggcgaagagaagagaaaaattaagatggaggggaaggagcaggatgtgtcgctgggagcgaacaagttcccggagagacatccgattgggacggcggcgcagagccaagacgacggcaaggactaccaggagccggcgccggcgccactggttgacccgacggagtttacgtcatggtccttttacagagcagggatagcagagtttgtggccacttttctgtttcta

SEQ ID NO: 87643 - DNA, 244 bp, Glycine max
  Clone ID: 700909171H1
ggaaaagtacttttttttttaaaaaaaattatcttatttgagtgtgatcgatggcatacccaaacccttatccggcgcaaccgtatccctccacctccgtgccgatgccggcggtgcccaccgccgtgatcggcccccagttctgtgcgccctacccgctggatctggcggtggtgaagaaggtgatgacgctctccgacggtaactttgtggtcaccgacgtcaacggcaacgtcgtcttcaa

SEQ ID NO: 87644 - DNA, 245 bp, Glycine max
  Clone ID: 700909174H1
caattcacaaccgaaacagtttccatctctctcacaaaatgacaacaatatcaaattgctcccttctcttcctcttcctcttcctctccaccctccacatagcttccaccctctcaacccccaccaacttcatcaagtcctcctgcagcaccacccagtacccagccctctgcatccagtccctctccgtctacgcctccaccatccagcaagacccccacgagctcgtccagacagccctctcc

SEQ ID NO: 87645 - DNA, 244 bp, Glycine max
  Clone ID: 700909175H1
caccgcagctatgtcagagatgcttggaaaccccgtgagcctgagaggcgccaccaggtctgctccatcaccgtctacacctgttactttcaagaccgttgcgcttttctccaagaagaaggcagcaccacctcctccaaagaaaaagcctgctgctgtatcccccgccaatgaggaactcgccaagtggtatggtcctgacagaaggatcttcttgcctgagggtctcttggaccgatcagag

SEQ ID NO: 87646 - DNA, 242 bp, Glycine max
  Clone ID: 700909177H1
gaggaatcctgcaagaatccaaaggaagacatgaagacaaaaatttcaagagtttatatgaggacagaagcatctgatacaagccttattgtgaaagatggatatcaatggaggaaatatggacaaaaggtgaccagagataacccttctccaagagcatatttcaagtgctcttttgctccaagctgcccggtcaaaaagaaggtgcaaagaagtgtggatgatcaatctgttctggttgc

SEQ ID NO: 87647 - DNA, 234 bp, Glycine max
  Clone ID: 700909179H1
gatgctatcaatattgcagtaagatgcaaggttcctatacaagtcaacaagtacttggcatacagtgatggtatgagagtaattgaatcaggcaaattgtcaacacagttccctggtatggatggccgaatattcactgaaatggacgggccaagtggtcaaccttgtgccgagaccacggagtttaatcttttacacaatatgttgaaagctgttgttgaagaacgctatgaa

SEQ ID NO: 87648 - DNA, 241 bp, Glycine max
  Clone ID: 700909181H1
ggcatggcactctgctggaacctttgacaagggcacgaagaccggtggacccttcggaaccatcaagcaccctgccgaactggctcacagcgctaacaacggtcttgacatcgctgttaggcttttggagccactcaaggcggagttccctattttgagctacgccgatttctaccagttggctggcgttgttgccgttgaggtcacgggtggacctgaagttccattccaccctggaaga

SEQ ID NO: 87649 - DNA, 238 bp, Glycine max
  Clone ID: 700909182H1
agcagccatcagctgcaacctcaagtgagaagtcactggagttgtctgtcccagaaaatgaaggatgggcaacatttgatatgcctcagcacacatctactgcacaagtagaaattcaaccagcagtacaggaaaaatttgatccatttttgaacttaaatgcaaatacgctatggccatgttttgaaacttctagtgctagcgctctttcttcagttacatctaatttatggcgtga

SEQ ID NO: 87650 - DNA, 242 bp, Glycine max
  Clone ID: 700909184H1
ccgccgccgtatatcgtagaatcttctcctactgcctccccgccacctccagctccaccggccgcctctccttcggcaccaccaccacttcctacgtcaagtacacccccttctccaccatctcccgcggctcctccttctacggcctcgacatcaccggcatctccgtgggcggcgccaaactcccagtctcctcctccaccttctccaccggcggtgcaatcatcgactccggcaccgtg

SEQ ID NO: 87651 - DNA, 244 bp, Glycine max
  Clone ID: 700909185H1
ctaggcaggtcgattgacataacacccgaatccaagtgaaccgaaaaacactcatcatcatggattcagttgcattaaatggcaaaagcaatgataagcctcttcacgttgccatgctcccatggctggccactgggtcacatatacccttacttcgaagtcgccaagattcttgctcaaaagggtcactttgttaccttcataaacagccccaaaaacattgaccgcatgcccaaaaccccga

SEQ ID NO: 87652 - DNA, 242 bp, Glycine max
  Clone ID: 700909186H1
aggaaagtttggctattctttattacacctgatttttctcactcaaacaaatgatattagaaatccacattatgaaagtatgtatgtggatttctaatatcatttgtttggctgagaaaaataaggtgtaataaaggaggaaagtttggctattctttcaaccatgtgacttgatggccaattgtactctatcaaataacatatgttaatctgtcattcattatatgtttttattggctcgt

SEQ ID NO: 87653 - DNA, 240 bp, Glycine max
  Clone ID: 700909187H1
atcatagattagccttagtaccaattcaggagcagcaacaagaacaaccaaggaactcaaatgagaattctctggaactataccaagagcaacaacaccaaccctcaaggaattccacctcaggagttgtagttaccacaaattgggagttgtttgattctgtcccaccattaatccctgtgcaatccacatccccaccctcctcagtgaccaataattcaggtcctcccaagttcaatt

SEQ ID NO: 87654 - DNA, 156 bp, Glycine max
  Clone ID: 700909190H1
ccggaaagttcgatttgaccgtttccgtcgccggagattccctcacgttacacaccggtgttgattcgtcgaggattgcggacaccattctggattcctctccgctttcgatttattcagtcgacagcgttcttcttccgcaggaactgttcgcga

SEQ ID NO: 87655 - DNA, 240 bp, Glycine max
  Clone ID: 700909192H1
cagatatcttgctagggttttaggaaaagacactgtctcgcgagtgggcacaggttacagcaatggctttctttggtagaattgggaatttattaagacagacagcaagcaggcaggttagttcagaattgcgatcatccccttcgttttttcaggctatacgcagtatgtcatctgctccaagcacaaagctgtttatcggaggtgtttcatattctactgacgagcaaagtttgaggg

SEQ ID NO: 87656 - DNA, 239 bp, Glycine max
  Clone ID: 700909194H1
ctcgagaaaagcagcatagtgagatactacgtatactacgtagtactacacatttcatttgcctcttgtagtagccatggttttccaaacaaacattaatcctcacttcgtattgtttcctctcatggctcaaggccacatgatccccatgatggacattgcaagactattggcacggcgtggtgtgattgtttccatattcaccaccccaaaaaatgcatcacgattcaattctgttc

SEQ ID NO: 87657 - DNA, 239 bp, Glycine max
  Clone ID: 700909195H1
tttttctctctgcagaatttcccaaatttctccactaccctatctcttttgctcctgaaactcccacattcttcaccagctatgcacgatcttcaatacgaatgcagtttcgatatttgatatcggagtatcggtgtttgagcggctgaattggaattggaaaatgcttgaggcaatggaaagttcggtcaatggtgggtttacccatttgcagagctgtggagatagcagcgaagaag

SEQ ID NO: 87658 - DNA, 237 bp, Glycine max
  Clone ID: 700909196H1
gtgcaagttgagattttgattggtgtttggctcccaaattcccaaaacagtgatggtctcaagtaaaagaaatgtttttggcaccaagggggaaatgggtatagatttcatggttttggtgttatcagtgtcatggttttgtttgactagtatatgtgtctctgctacaaaacaagcatacccgccaacaccacaaccgaaccagaacttaaggtttgaccagaatggagaattcaa

SEQ ID NO: 87659 - DNA, 268 bp, Glycine max
  Clone ID: 700909204H1
gaaaggctctggggtgaaaacttttttgatccagccacaaagaaatggaccagcaagaatagtggttctgctacctgcaagcgtgggtttgttcagttctgttatgagcccatcaagcagattattaacacttgtatgaatgatcagaaggataagctgtggcctatgctgcaaaagcttggggtcaccatgaaatctgaggagaaggacctcatgggtaaagcattgatgaagcgtgtcatacaaacctggcttgcagcaagtagtg

SEQ ID NO: 87660 - DNA, 294 bp, Glycine max
  Clone ID: 700909205H1
tctttgttggattctattcccttcactttctcttactctctttcctttttatgttttcctcttatgcttttctttttggttttttccccctcactttgcgcttgtcgatctttgtaactagctataatgcaagcacctcaagctgcatcagccactgatgaagctcctgagatttcccatcaggctgtcccccagcgaaacaaagaagtttcagacagtggacccggtggtaggcgccctgatatttcacttcaagttcccgctagacctatagggtctggtagcactagtagt

SEQ ID NO: 87661 - DNA, 290 bp, Glycine max
  Clone ID: 700909206H1
cttcttctcttctctgcttttccactccttctcctcacttaaccctcccttttatttccattgttattctgcctaagcagtttcttccaaacttccttttacatttcctatttctctatactatcaaaagggtttgaactttgaagggaaattcagaaagatatgatgacgaaccacaatgtggtgactcatgaggttattaacacgttgattgccgtggcagcttccatttcaaactcacacgcgttgccaagtgcaacagtgccagaatccatggctgtgcttggtgg

SEQ ID NO: 87662 - DNA, 294 bp, Glycine max
  Clone ID: 700909208H1
cactgccatgttcttcgaatcccgatccctcctcttcccgctccttttctctctcttccttgcttccgccttcgcttcagagtcagatcacaagtatcaacatgatgaacaagttaacctttgggtgaacaaagttggtccttataacaatccacaagaaacatacaactattacagcctcccattttgtcatccatctagtagtgctagtgctgcacacaaatggggtggtcttggtgaggtcctgggtggcaatgagctcatcgatagccaacttgaaattaagttccaaag

SEQ ID NO: 87663 - DNA, 293 bp, Glycine max
  Clone ID: 700909209H1
catcaaaaaacacacacgacacactcccatacacacacgttgtctcgcacacattccttcattccgcagcagcaaacatctttaccttaaacgacaacaatggccgatgccgaggatattcaacccctcgtttgcgataatggaaccggaatggtcaaggctggttttgccggagatgatgcgccgagggcggtgttccccagcattgtggggcgtccacgtcacacgggagtgatggttgggatggggcagaaggatgcgtatgttggggacgaggctcaatccaagagggg

SEQ ID NO: 87664 - DNA, 293 bp, Glycine max
  Clone ID: 700909211H1
gccaattgccatttcaatccccagtttcttctacaacgtcctcttacgagcagatcccaattctccttcccagtttcaaaccctaattccctcattcccatggcctcagaagagcccactgtcgcggtggaacccgctcccgaacctgccaccgccgagcctcccccggaggagaaggaggagcccaaacctgaagccaaggctaagaaaaccaaggaacccaaacctaaaaaggtttccagaccacgcaaccctcccactcatccttcctacgaggagatgattagagacgc

SEQ ID NO: 87665 - DNA, 277 bp, Glycine max
  Clone ID: 700909212H1
tccgaagccaaattgaggagataagacaataggttactcatataactggttaaggacttgatccgcgcgcatggaagcaggtttctcccatcgaaggcaaagcagaaagaacggaaagggttcaagtcggagtaccacctttgctggatcattgagacaaacctttgcgtctttcatacgtgtgattcttttagacatgtgaacgcattgttttctggagctgaaatctgaatgttactgcaataattatggattcttctgctgtcgtgggtaacac

SEQ ID NO: 87666 - DNA, 290 bp, Glycine max
  Clone ID: 700909214H1
aaccctgactgattctcttgtggctgctgctggtattattgctcaagaagttgcaggtgatgtccgtatgactgatacccgtgcagatgaagctgagcgtggtattacaatcaagtctacgggtatctcactctactatgaaatgactgatgaagctctcaagagttttaagggagagcgcaatgggaatgagtatcttattaatctcattgactcccctgggcacgttgacttctcttctgaggttactgctgcacttcgtattaccgatggagctcttgttgtggttg

SEQ ID NO: 87667 - DNA, 287 bp, Glycine max
  Clone ID: 700909215H1
gttcagcacaccggtggaggaagaggaaacggtcgagttttgttgggatttgatcactgcaatatcaatagccaatgttcatagattccacatattctggcccatcttccatgagtaccttctttcagttgctcagtttcccatgttctccccaatcccatttgtagaaaaaggtattttaggccttctcaaggtctgtctcaagctcttttctgcaccaagagacgaaaaacaagccgaggaacttattttcaagtccgtaaacttaatgtggaagcttgatatag

SEQ ID NO: 87668 - DNA, 295 bp, Glycine max
  Clone ID: 700909217H1
gaagttacaaagaaaatgacccatgtggtgtttattggtgaagggggaaaaaagacacgaatatctggtaacaaaaacttcatagatggaacgaacacatatagaactgccactgtcgctattcaatgagatcactttgtggccatcaatatggggtttgagaattctgctggacctcataagcatcaaacggtggcattgagagtccaagcagacaagtccatcttttacaattgctcaatggatgggtatcaagacacactttatgcacacaccatgcgtcaattctatagag

SEQ ID NO: 87669 - DNA, 290 bp, Glycine max
  Clone ID: 700909218H1
ttggtttgtttgaggtcttgtatgtggctgcagatatccaaaccttaaattcggtcctcgaatctttctgatcattggttgttcattattctttcaaatacattccaaaatctcttggaaattgcgagattcactgcttatcctagcagcagattttgggttctgacccaattattcattttccccaactgggtcttgtggatttgtcgttggggttttaaatttcgtgatgctgggattgaaagttatttcctatcttccccgactggattcaactcccaagtaattgc

SEQ ID NO: 87670 - DNA, 282 bp, Glycine max
  unsure (1)..(282): unsure at all n locations
  Clone ID: 700909219H1
cagacgtatggattggtgtatgcttcaggaaggagttaaaccgttcattatggtcttgtcttcccccaacaaccgttctcatctcttntattcatgacacaccacactctctctcacatcttccatctcctccatcttttccacacttttctcccacatcactatcacattattacgttgcattaatacaatggaccaaacaaccgccgctgccaacgaggttgtccgcgatttcccctgcctcctccgcgtctacaaagacggccgtgtcgatcgcttcct

SEQ ID NO: 87671 - DNA, 291 bp, Glycine max
  Clone ID: 700909220H1
caattcttgtcatcaaattgtgatgctgtattttcccattttaggcccagattgatcaccttcaaattttgctatatgcaggctggtggttgaatttgacggatgcccttttgagattttggcctttctttcccttgtacacgttcaaacttggatttttatgtggaagggaaagagggcataattccaagccttaaacttttgtaatgcccttcatttatttggttgttttttgttagtattggaattataaaaaatgagtaaggtttctggtgttatatcccgccaagt

SEQ ID NO: 87672 - DNA, 293 bp, Glycine max
  Clone ID: 700909221H1
cacaagtcataactcgttagagagagtttgtgtgtgtttttgtgtgtcaccttggtgcatacaacacaagatggaggaccaaaatggtagtggtaagttgagccaagggcttcgcaaggtgaagccttaccttgctatattgtcccttcagtttggctactcagggatgtatatcatcactatggtttctttcaagcatggcatgagtcattggatactctcagtgtaccgtcatgtagttgctgctattataatagtccctattgcacttgtccttgaaagataaataagac

SEQ ID NO: 87673 - DNA, 291 bp, Glycine max
  Clone ID: 700909223H1
agaaaagcaaaggaagaaaagaaaaacatgaaagaaagaaagaaaagaaaagaaaagcaataaagaaagggaaaaaaaaagaagaagagagaaaacaaagacaaaaggttctcaaaactccatgattattcaaattctctaaaaaacagtaccaagcagtagtagtgttccctctacttaatcaacccacaggagaggacctctacaaagaccctgtttaggcttgggttggaacaacatcaaaaaagagaaagcaaactttcttttctcttttgtagatcgagatcgtag

SEQ ID NO: 87674 - DNA, 292 bp, Glycine max
  Clone ID: 700909225H1
ctcacagtacttttgcttctctcgaagatgtctctacgagtgctgaaccctaacgccgaagtgctgaacaaatcggcggcacttcacatgaacatcaatgccgccaagggtttgcaagatgtcctcaaaaccaacctcggtcccaaaggaaccatcaaaatgctcgttggtggtgctgacgatatcaagcttaccaaagatggcaacactctcttgaaagagatgcaaatccaaaacccgacggcgattatgattgctagaacggctgtggcgcaggatgatgctagtggtg

SEQ ID NO: 87675 - DNA, 287 bp, Glycine max
  Clone ID: 700909226H1
gaaacgctgaagctgagttggagtcacagttgttgttggtagccatggatgcagtagctacggcgaaaccgcttctgtcactgtcgtttttgcttttgctaccgtcttttcttccgatcgccgtcgcttacagacccggcgacatcgttcccatgagccgcatgggtcaataccactcctcgcgaaccgtgtggcaggacctcattggccgtcactgccccatcttcgcagtgaatcgcgaggtgttgatgcccatacccaagcccacgggttacactggtgcggat

SEQ ID NO: 87676 - DNA, 290 bp, Glycine max
  Clone ID: 700909227H1
gagccagaagctggtcccaaccaaagatcacaaccccatcaagcgtggcttccggtcactggcttactttgtggaggacaattggaaacggatttgggttattctcctctggctttcaatttgtgctgcccttttcacttggaagttcattcaatacaagcaccgtgccgtgttcgacgtcatgggctattgtgtcacttcagccaaaggtgctgctgaaaccctcaagttcaacatggccttaatcctgttacccgtttgcagaaacaccataacttggctcagaagta

SEQ ID NO: 87677 - DNA, 287 bp, Glycine max
  Clone ID: 700909229H1
tagtgtggtctgcaactatgagcaaggattatctaatcatactttctctccttctttccacggtgcttgcaacttgcaattcttcttcttcttcttcctccctctatcttgggaagggcttctcccatcgcaaattgtctcccagttatcacattcacaaaaccattgacgaatcctatgcagttatcttcgatgctggtagcacgggaagccgtgtacatgtctatcgttttaaccaacaattagatctccttcgcattggccaagaccttgagttgtttgtcaag

SEQ ID NO: 87678 - DNA, 293 bp, Glycine max
  Clone ID: 700909231H1
cgctcttctcttcaccgtctctccatcctctatccttcacgcctattgtaacacgaagaaaagcacagtaactgagaggacacgatggtgaagaagagcaagaagagtaagagcaagagggtttcgttgaagaagaagtacaaggtcataaggaaggtgagggagcacaacaggaagaaaacgaaggaggcgaagaagcttcgcttgagtgggaagaagaaggttgagaaggaccctggtattcccaacgattggcgcttcgaggagcaggaactcaaagcgcttgaagctcg

SEQ ID NO: 87679 - DNA, 282 bp, Glycine max
  Clone ID: 700909233H1
gcctatgagagtgaactctttgaaggatggagcagaacgttcggttcggttaggaatgaattcccatcagtttgatcgcagccttagagcggatcgcaagaccacaaggaagggcagccaaggtgttgcagccacaaggaggccatcaactgcttctactcatgctcgcagaagtgtggactcaccacaactgtccaagggcaagcagactctcctgccaccaactagaaccaaagtatcagcccaaagtcggtatcattttgattctcccagcaaagtatt

SEQ ID NO: 87680 - DNA, 278 bp, Glycine max
  Clone ID: 700909234H1
ctcattctactacaagtcagatgaggaacttcaaaaagaccccgagctccaagcttggtggaaagaacttgtagaggtgggtcatggggatttgaaggataagccatggtggcaaaagatgcaaactcgtgaagagttggttgaagcttccgctaccctcatatggattgcttcagctcttcatgctgctgttaactttggacagtatccatatggaggtttaatcctgaataggccaactattagcaggagattcatgcctgagaaagggtctcctg

SEQ ID NO: 87681 - DNA, 226 bp, Glycine max
  Clone ID: 700909235H1
ggtggaacaagtggatcggtcaaccactcaacctgacaaatctctagtatatccaatacaattttattaataaaattaattattttttttagctttattttacttttggtaccaagagatccagacatttaaattaaagataacccttctgcaaaattaaatgtctggatctcttggtaccaaaagatccagacatttaattttgcagaagggttttctttaattt

SEQ ID NO: 87682 - DNA, 287 bp, Glycine max
  Clone ID: 700909236H1
gaaacgcttgcaagctaggatacatatttgtggaatgactggggatggagtgaacgatgcacctgccctcaagaaggcagacattggtatagctgttgctgatgctactgatgcagcccggagtgcatctgatattgttctaacagaacctggacttagtgttattattagtgctgttttgacaagccgagccatcttccagagaatgaaaaattatacaatttatgcagtatcaattacaattcgtattgtgcttggttttatgttgctggctctcatttggaagt

SEQ ID NO: 87683 - DNA, 281 bp, Glycine max
  Clone ID: 700909238H1
caggcctgcacggagggttttgacgatgccaaagacggtgagaagaagatcaaggagcagttgcagacccagaccttggacaatgttcagaaactcactggcatcacccttgacattgtgagttctttgtcccacatcctcgagcagtccggcttaaagtttaatcttaaacccgcatctcgtcgtcttctcagcgaggatgggttccccacttggttctctgctggtgatcgcaagctctttgctcgtggatggagagcacgtatcaagcccaatgttgt

SEQ ID NO: 87684 - DNA, 291 bp, Glycine max
  Clone ID: 700909239H1
gggtttttgagtgcggtgcggcgatcctagcactctcttctgcagctttcgccgacagcttcattcaccatggctgagcaaaccgagaaggcttttttgaaacaaccaaaagtgtttctcagctcgaagaaaactgggaagggaaagagacccggaaagggtgggaaccgcttttggaaatccattgggcttggatttaagactcccagggaagccatcgaaggaacctacattgacaagaagtgccccttcactggcaatgtttccatccgtggccgtatcttggctgga

SEQ ID NO: 87685 - DNA, 286 bp, Glycine max
  Clone ID: 700909241H1
atttgccgctcttccgctgcgccgcccccttatcgtcaccacaaaacctaagacactcaatagatcttaacttggtaaccactttctcacggcaagggctgtttgaactttgaaccgccgccgtcaaccgtctgccactgccagagttcatttggacaaaagacaatgggggagtagaggattctataaaccttgggagctgtcatctatacagggattatagtgttacttgcattattaatttacttagataacaagacacataggatggaacccagtagagagc

SEQ ID NO: 87686 - DNA, 285 bp, Glycine max
  Clone ID: 700909242H1
aaaaaataatttttgggaatgaataaattggtaaaattgtaataactcctggttgagcatggttgtggccttagcaatttaggggaagagaagaaagtgctgaaaagagaaagttgttatccacaagacaacgtcatcaacattacacaaggcgcagggtggtctctgtgatggcaacctctttctctccgacagcctctgtcggctccatcatcttccaaaaccctcccaaaggccttcttcttctctcccagcagcagcaacaacgctccttcgcctcttctg

SEQ ID NO: 87687 - DNA, 70 bp, Glycine max
  Clone ID: 700909245H1
cacttcacttgttctgcattgaccatagcttctctctttctttcctgattaatccttccacacaacatac

SEQ ID NO: 87688 - DNA, 117 bp, Glycine max
  Clone ID: 700909247H1
attactatcttgcctctcttcttctgctactgctgctcaacccacacaccaccctgggagcgcagaacctcatgctaccctaccataacggcggcctcctcaaaggaaccattaacg

SEQ ID NO: 87689 - DNA, 288 bp, Glycine max
  Clone ID: 700909248H1
gaagccgaagatatatcctctccaaaagcgatgaagagttattcacaccttacgttgacccctgttcatgaggaagctaagatagtaggaaaaacaagctatgccagcaacttgtctgggtatgatgaatatgttccaatggtagacatacctgttgatgctggttggaagaagcaagcatctctacagaagtcttacacctctaaaggagcacctcctcctgacactcagaaaactcctgaagggattcaagctcggatgtgggtagcactgtctatcttcttcttg

SEQ ID NO: 87690 - DNA, 297 bp, Glycine max
  Clone ID: 700909249H1
catccaccatggggttactacttagctatgctctgaacattactagtttgcttaccggtgtgctgaggctggcaagtttggctgagaatagtttaaacgcagttgaacggattggcacttacattgatttgccctcggaggctccctctatcatcgatgataatcgccctcctcctggctggccttcctcaggctcaatcagattcgaagatgttgttcttcgctacagagctgaacttcctcctgtgttgcatggcttgtctttcaccattttcccaagcgataaggttggcattg

SEQ ID NO: 87691 - DNA, 286 bp, Glycine max
  Clone ID: 700909250H1
aaaaattcgcagcggcaccactttgcttcaacctctaccctttcacgacactcgaagccctcgctggccaggactcgatgggaaaggagagccaaacgtccgctatggaaatcgacgctccaaaatcgatgaattccgatctgatcgttccaaaattctccatcaacgtgctgcagctcttaaaatctgcgcaaatgcagcatggcttgcgtcatggagactacactcgctataggaggtattgcacagctcgtttgaggaggttatataaatcgttgaagtttac

SEQ ID NO: 87692 - DNA, 284 bp, Glycine max
  Clone ID: 700909251H1
ttctcgaccgattcggctcactctcagttccgttctgcatcatagagtatggccagccacgatcttcgattcttcgagttgaacacaggcgctaagataccttccgttggtttgggaacgtggctcgctgaacctggcgttgttgctcgcgccttggccactgcaataaacgttggatatcggcatatagattgtgcgcaaatttatggcaatgaaaaggagattggtgctgccttgaagaagttatttgctgatggtgtagttaagcgtgaagatatgtttat

SEQ ID NO: 87693 - DNA, 275 bp, Glycine max
  Clone ID: 700909252H1
ttctcactgatatttcctctgtactaaagactaaagagagacgaaacaatctctgtctctgtgtgcgtgcgtgcgtgttttcctctatctgtctgatagatagaataatatcccaaaccatcgaaaggaagcaacgaggaaaaaagaaataaatgaaaagcgtagagagccatataatgctccgctttgtttgcatatccatgtgagggttctgacacattctcttcccctatcgctgggtggcttgttcgccttggtggtttctactgagtcac

SEQ ID NO: 87694 - DNA, 269 bp, Glycine max
  Clone ID: 700909254H1
gttcgctataatcacaatattgttctctatatttcgtcttgactttggttttgcacaacagggggatcttgacatatcaagatttggaggaaaaccaaatacaaatataggctatgctttcttaagtgccttgactcaagcatgtgcatcaccaactactgtctaaattgtgattccagctggcacataccatatgggtgctattgatgtcaaaggtccttgcaaggctcctattgaggttcaagttgatagaacaattcagcaactgc

SEQ ID NO: 87695 - DNA, 287 bp, Glycine max
  Clone ID: 700909255H1
gttacaatccaaccccatcaactcctcctggtggtggaagctatgatccaactccatcaccaccctcgggtggtggaagttacaatccaactccatcaactcccccaggtggtggaagctatgatccaaccccatcaccacccacagatggtggaagttataatccaactccatcaccacccacaggtagcaactgtggaacaccaccacaagacccctctactccaacaccctcagtcccaacaacaccatcaaccccatcaaaccctcccttgggaggaggtggg

SEQ ID NO: 87696 - DNA, 283 bp, Glycine max
  Clone ID: 700909257H1
aaactttcttagcaagatcactcctataccaataattaaggaactttttcgaactgatggcgaacagttcctcaagtatccaccacctaaagtgatgcaggtcgacaagtctgcatggatgactgatgaagaatttgcaagagaaacaattgctggtttgaatccaaatgtcatcaagattattgaggagttcccactaagtagcaagctagatactcaagcctatggtgatcatacctgtataataacagaagagcatttggagcctaacttaggtggtctc

SEQ ID NO: 87697 - DNA, 282 bp, Glycine max
  Clone ID: 700909258H1
gaaggtacgtggtttatgtcaaagaaggagtgtacgatgagaccgtgacagtgacaaagaaaatggtaaatttaaccatgtacggtgacggacagcaaaagagtatcgtcactggaaacaaaaatttcgtggatggagtcaggaccttccaaactgcatcatttgttgtacttggagagggattcttggggaaagacatgggattcagaaacacagccggtgcagagaagcaccaagcagtggccgcaagagtgcaagccgaccgagccatattcttcaact

SEQ ID NO: 87698 - DNA, 281 bp, Glycine max
  Clone ID: 700909260H1
ctccactacgattcgctcttccagaagcttccagaaaactccagatggcgcgtacaaagcaaacagcccgtaagtcgaccggcggcaaggctccccggaagcagctggcgactaaggccgcccgcaagtctgctccggcgaccggcggagtgaagaagccacacaggttcaggccaggaaccgtggccctgagggagctcaggaagtaccagaagagcacggagcttctgatccgaaagcttccgtttcagcgtttggttcgtgaaatcgctcaggacttc

SEQ ID NO: 87699 - DNA, 278 bp, Glycine max
  Clone ID: 700909262H1
catttacacacctctccaacctttcactttcagctttatttgaatccctctctctcctttccaaatggccagcgttgaggttgcacatcaaacaccaacaacagttccagaaaatgaaacaaccgaggtaatcaagacccaggaaacaaccccggaaccagtaccagccactgaggctcctgcaacagaacaagcagcagctgaggttcctgctcaagaagaacaacaagcaactgaggttcctgccccagaatcaaccaccgaagcaccaaaggaag

SEQ ID NO: 87700 - DNA, 281 bp, Glycine max
  Clone ID: 700909263H1
cacttgccttatttttggttttgagattgagctaaaggccaactcaaccatcgaatttgttggtgattgaaagagaaggaagaagaagcaggaaatggaagcagtgagagctggtcgagaaggagcaataggtctaggtcaaggtgatggcgtagcaaggacagcactgagactgaactcaccaaaatccgtctcctcagggcaattgttgaaacccgtgatccctcttccaaggtaaaccacactattcttgtgcctcaacctctataggtcaattagtc

SEQ ID NO: 87701 - DNA, 282 bp, Glycine max
  Clone ID: 700909266H1
caataatgagtttgatagcttcgaggacgtgcgttgtctctttgatggcggagtttatctccctacagatgtactcagcaaaattagccccataccggtgctcaaagaaatcttccgcactgatggtgagctagccctcaagtttccaccacctcatgtcatcaaagttcgtgagtctgaatggatgactgatgaagaatttggaagagagatgcttgctggtgttaatcctggcatgattcaacgccttcaagagttccctccaaagagcaagctagatcc

SEQ ID NO: 87702 - DNA, 285 bp, Glycine max
  Clone ID: 700909267H1
cctctctctatctctcacacacactttctctctctctctctctcacccagatcttgtagcaatggcgagcgctcccactccacgcgaagagttcgtgtacatggcgaactgtgcggagcaggccgagcgctacgaggagatggtggagttcatggagaaggtctccgcctccgccgagagcgaggagctgaccgtggaggagcgtaacctcctctccgtcgcctacaagaacgtgatcggcgctcgccgcgcctcctggcgcatcatctcctcaatcgagcagaa

SEQ ID NO: 87703 - DNA, 280 bp, Glycine max
  Clone ID: 700909269H1
ctttatttcagcattttccaagtcagggaatgttgatgccatgatagcttggtactcagcgaagaaggctgccagacttggtcctgatcttcaaatgtttgaatccctcatatcaggctgtgttaattctagaaagtttaagattgctgatagaatttttgaagaaatgatgatttctggaattgttcctagtgcttccataattgagagtatgcttaatgggatttgcaagcaaaagagattgggtcgggcagaggagtttttcacgtttgcgatggat

SEQ ID NO: 87704 - DNA, 173 bp, Glycine max
  Clone ID: 700909270H1
ggagaataatggcattcttccaagtgagtgtcaggcgttggattttaacctttgctatcctttacgtttgtgtatttgggaaaaactttggaaatgctgatgaggatgagtccgaggcacagacaggtggtggtgggtacggtggtgtgggaggtggttttggttgttcttgg

SEQ ID NO: 87705 - DNA, 274 bp, Glycine max
  Clone ID: 700909271H1
ctttagggatgaaaattaagactgacacacctgtggcaaagaaggctagagaaggagtgatggagtttttattgatgaatcatccattagattgcccaatttgtgatcagggtggagaatgtgatcttcaggatcagtcaatggcatttggctctgatcgtggacggttcactgaagtgaagagatctgtggttgataaaaatcttggacctctggtgaagactgtgatgactcggtgcattcaatgtacaagatgtgttagatttgcaacaga

SEQ ID NO: 87706 - DNA, 280 bp, Glycine max
  Clone ID: 700909272H1
gaattagggttttccaattcacagagcaacgcaacgaaccatcaatggcgcagctcagccgcagtcgcagccgcagcacgggcaagcagcgctggagcaggtgcagtgcttcggtcgctagacgaccgccgtggccgtgacctactgcaagcgcgggcgcggtctcatcaagatcaacggctgccccattgagctcgtggagccggagatcctccgcttccaaggccttcgagcctatcctcctgttgggtaagagccgcttcgccggcgtcgacatgcg

SEQ ID NO: 87707 - DNA, 157 bp, Glycine max
  Clone ID: 700909273H1
gcaaagggaaggaaaagtaccttccccaataacccttctctccgatttggcttctctcatcggagggagaaaatcaattgaagagaaaaaaaacccacaaaaagattgtaacagaaaaagtatgaaagggatagtactaggttccgcagtttctctc

SEQ ID NO: 87708 - DNA, 278 bp, Glycine max
  Clone ID: 700909274H1
aattaaggaacaaagaaaaacttgagacaacagagaaaaagggtcacaacaatggcttccttagactctctcgatttctccctcttccgtctcagcactgacttctgctctccttttgccattttcgttcaggcgcagggatgtataataaacctaatccttgcttttgggtgggcttgtgctgcatttgtcaggaaccgagaaataaatagaataaagaagagtatgcggaatggcaataactttgcattcctttgtcatgatattagtgaacttga

SEQ ID NO: 87709 - DNA, 276 bp, Glycine max
  Clone ID: 700909275H1
atttcattttgttcctcacccagtcaccaatcccgttgtccggagccaccattttgcgctccggcaatgttcttcccggtggccatcgtcccttaaacccaccacacttcaaagtcatgggtattccatgggacgacgtcgttgtgatccagcaagggtaggatcacaatgagccctgcatcgtcaccgtcaattgccccgacaaggctggtctcggctgtgatctttgcagaatcatcctcgagttcggtctccgcattacccgtgctgatattt

SEQ ID NO: 87710 - DNA, 291 bp, Glycine max
  Clone ID: 700909276H1
ggaattcggctcgcggagaaatgcaaatcaagtatttgcatcagagaaaggagaaggtagcagtgttgttttctcatgagaagcaccacttatgaggaaagagtcaagaatgtccactccttattgttgccatgctatgaagctcaaatccagggatgttacaacagattgtgagcttggaagtaatgagaaatttgggttggagaagaaactatgtagacaagataggattgagttgggtcggttgtttcagagtgcagtgagttcccatgactgggaacttgctgaaag

SEQ ID NO: 87711 - DNA, 274 bp, Glycine max
  unsure (1)..(274): unsure at all n locations
  Clone ID: 700909278H1
aaagagtgtttcagatcccgaaccgcatcgtacggtaccacaagtacgagttacagttatagtcatcggtagtagcgttacgtngatcagatcagaattgtgatcgtggatcgaagcaatgttcaaattcttgaaagaggtggtgagtggatctggcacgggcctcaaagatctcccatacaatatcggtgacccttatgcttctgcttggggctcttggcttcattttcgcggcacctccaaagacgatggtacccggtgtccataatttctc

SEQ ID NO: 87712 - DNA, 277 bp, Glycine max
  Clone ID: 700909279H1
aataattggcagatggcacttcgttgcttggtgatgtccctttctgttctcttcactcttggtcttgcgagagaaagccatgccagagacgaagatttttggcatgctgtttggccaaacactcccattccaagttcattgcgagatcttctaaagcctggccctgcaagtgttgaaatcgatgatcaccctatgcaatttgaagaaacacagtacccgaaaaccttcttctatagagaagacttcatccaggcaaaacattgaggtacaattcagc

SEQ ID NO: 87713 - DNA, 283 bp, Glycine max
  Clone ID: 700909281H1
cttcccgccgccgccgccgccgtcagcgtcacaccaatggcagacaccatcttctctgccgacggatcaactcgccgccatcaccctcgacgaggttcccaaagctaatttctccgaccgcgtccccatccgatccatcatctcccgcaccgacggcggctcgggcctcgccggcaggaaagcgcgcgttggcggctgggtgaagacgggacgcaaagccgacaaggacgctttcgcgttcctggaaatcaacgacggaagctgcgccggcaacctccaggtc

SEQ ID NO: 87714 - DNA, 277 bp, Glycine max
  Clone ID: 700909282H1
ccaaccctgtttgaaattcacctgtgcttgtttttctcctacttcacacttctgatctcatctctctcacacctcacctcgttttgctttttttacttttgaatgttaccatcttaattttttctctttgggtatcttcacaaagcaaagaaattcactgagaaagccaaagccaaaggtgatgatggaataataagtacaaatgaaagatgaacaggaaatattgaattgggtcaatcggatctaatctatcgagtataagtaggtaattcacaaa

SEQ ID NO: 87715 - DNA, 237 bp, Glycine max
  Clone ID: 700909283H1
ctcgagccgaaagaagaataaacactcgagaaatttctcacttagggtttggatttttcacgtaatcttctctctccgtcacttcatctcacgcgatctcgttccgatcgcacgcgttttaatgatcgtcgtcttccgcggcctctgattcggctctgatcttcctcgccgcacctctccgcacctctccgccggaaccatgatctccgtgcagggcgacctccaccgccaccacca

SEQ ID NO: 87716 - DNA, 254 bp, Glycine max
  Clone ID: 700909284H1
gcgaaatatacctcattatgtgattatcttgtaatttcacagttttattgttatatatttccagggtctttctgaaggaacattttcttgattttcaatgggaggaacaactttgattttttttcccgctgaaggaaattgtaaaccaatatctatggcaagaaacaaggagagtgaattatgcttatgacttaccaataaaaaaacctagtattcttttcatatcaaaaaaaaaaaaaaagggcgtccgccga

SEQ ID NO: 87717 - DNA, 225 bp, Glycine max
  Clone ID: 700909285H1
aaacggcatttattgagataggtcaacgagttgcatttgttagtatttatataccttttcggcatgtttcctgctgttatggtatatgttgcatcaatcttcacatgaaatcttcgctgatgcattctaataagagtaactatattacctagggtaaatatcttattgagacctatcatttctctttttgtttattctcttaatacttaataatatttatcacat

SEQ ID NO: 87718 - DNA, 274 bp, Glycine max
  Clone ID: 700909286H1
tttgctattgctgttactattgttgttgtggctgttcctgaaggtttacctttagctgtaacattaagccttgcttttgcaatgaaaaagatgatgaatgataaggcacttgttcgtcacttggctgcttgtgagacaatgggatctgccactactatctgcagtgacaagactggcacactaactactaaccatatgactgttgtaaaagcttatatatgtgggaagattaaagaagtaaatggttctaaggtctactctgatttctcatctg

SEQ ID NO: 87719 - DNA, 280 bp, Glycine max
  Clone ID: 700909287H1
atcccatttaatttaaagagagagaaaaatacaaacacaaagaaagagcattagaaaaagaggattaaggaagaagaaggagacgccggaccaagcgtccgtgtttcatctttggtctcctctccttcctcttccccgtaatcctcccttaaatcatcatcccatattcacaaatcacaatcattaattcttagattaattgcattcgaggtattttctgctttcatgtgtcgtaattgttcatgattttgtccttaaaataatcctcattctggtttca

SEQ ID NO: 87720 - DNA, 281 bp, Glycine max
  Clone ID: 700909288H1
ctagatgaggacaagaagaagaaagatttgaggaatgaatcactccaattggcttcaaaggaacaaaagatagctgatgagaatgtcttgaggcttgttgaagagcaaaagcgagagcgagaggaggcctataacaagatacttcagttggaaaaacagttagatgccaaacaaaagttggtaatggaaattgaagagttaaaagggaaattgcaagttatgaagcatcttggagatgaagatgacgcagctgttcagaatgcaatagaggagatgaatgt

SEQ ID NO: 87721 - DNA, 273 bp, Glycine max
  Clone ID: 700909289H1
catactcattgctgttcaccattttcaattcattcctgtgttagattccaagtggtttggtttggtttgacataaataaacctttcaagatctcagaggggcagaagatcaaagccaagacaacacactctcatatataaaagagtgtctctgataatttgatctttgtttcttctcttactctcctttgagatttttcagcaccccaccaaggttttgtccgaaaagcttgaatttttcgcctaccctttacaatgatctcttcattgagac

SEQ ID NO: 87722 - DNA, 268 bp, Glycine max
  Clone ID: 700909291H1
cagagagaagcgtcttaataaacgctcttctctgaaaaacctgatttcttctcttcttctcttctctttcgtttcgatcttcgatctctgaaaatgagagagtgcatttcaatccacatcggtcaggccggtattcaggtcggaaacgcctgctgggagctctactgcctcgaacacggcattcagcctgatgggcagatgccaagtgataagactgttggtggaggtgatgatgctttcaacaccttcttcagtgaaactggggctg

SEQ ID NO: 87723 - DNA, 274 bp, Glycine max
  Clone ID: 700909292H1
atcaagagaaacgataggacattcaagcttacagagccattgtcagagcactgccctcctggtgaattcgttcgtgaaatccctctttcaactcgaattcctgaagatgccaatatagaagcatactatgatgagccaggatctgtgcttgagataatggtgccaaaacttcttccaggagcagaagagcatgaagttcgtgtttgccttcgcccaaatgtggggaatgatctcatgttgacttgagttatagacatgagttaggcacttaatg

SEQ ID NO: 87724 - DNA, 275 bp, Glycine max
  Clone ID: 700909293H1
aaagcactatggtgaagggggtcaagtcaattgcccaagatgtctcttccaagcccaagattgattctttagctctcaagaagaagctaaacacctcaatcaagcacccgcctgattctaagttgaagtttgtcaccactacagtcacaaaatctgaggtgaaatcaaaaccggtaactacatcatcagcatcgtccaaaacaataacaaagacaactactaccaaaaccaaagtgagagagaagaaagtctatagtctgcctggccagaaacat

SEQ ID NO: 87725 - DNA, 263 bp, Glycine max
  Clone ID: 700909294H1
gttctttcttcttccattgattcgttgcaatatttgtgcaagctccgttgctttctccgccaccactcctccgatcattctccggtgtagggtagagaaattgggaacaatgagtgaggtgtttgaagggtacgagcgtcaatactgtgagcaatcggcgaatctttcgcggcaatgcactgcggcttctgctcttgatggagaacaaaagaagcaaaaactttctgatatacaagctggattagatgatgctgacacattga

SEQ ID NO: 87726 - DNA, 209 bp, Glycine max
  Clone ID: 700909295H1
cccaatcgcaaattttcttccccaaatcgtagatcttcggtttaactggagtagtgtggtaagatgggaggtggatttagagtgcttcatttagttaggccgtttctatcgtttcttcctgaagttcaaactgctgacaggaaagtgccatttagagagaaggtcatatacactgtgatctctcttttcaatttcctggtttgtagtca

SEQ ID NO: 87727 - DNA, 263 bp, Glycine max
  unsure (1)..(263): unsure at all n locations
  Clone ID: 700909296H1
ctgctttacattacattacctctctctcactcacaggtctgctcttgtcctgctttaccatccagttatgtaaggaannaaaaattacctgaggtggttcaatcgctatggaatcctgcaattggattgacccacaagtgccagctgatgacttattgatgaaataccaatatctctctgataactacaatgcccttgcttatatctcaatccctagggagcttatctactatgttaagaaatcagcagtatttccatataga

SEQ ID NO: 87728 - DNA, 256 bp, Glycine max
  Clone ID: 700909302H1
gctcgagtgcaaagcgcaaattaaagcgcaaaaaccattctccttcggtgctcttgaaaacatgggaaaacagagcacagaattctctgccctcaactgcatcgacctctccaaccctgacatcaaccaatccgtcaatttactcaaacaggatgtttggattccggttttttctacgttgtcaatcatggaataagccaggaattcatggaagaggtttttgcacagagcaagaaattcttctctcttcctcaca

SEQ ID NO: 87729 - DNA, 271 bp, Glycine max
  Clone ID: 700909305H1
gagattttgattggtgtttggctcccaaattcccaaaacagtgatggtttcaagtaaaagaaatgtttttggcaccaagggggaaatgggtatagatttcatggttttggtgttatcagtgtcatggttttgtttgactagtattgtgtctctgctacaaaacaagcatacccgccaacaccacaaccgaaccagaacttaaggtttgaccaaaatggagaattcaagatattgcaggtggcagatatgcactatgcaaatggcaagacca

SEQ ID NO: 87730 - DNA, 272 bp, Glycine max
  Clone ID: 700909306H1
cttggcatcgcttctcctctctcccaagaaagaatcatcaatggcgattgaacacgaagacgatctcaaagacgagaagaaccctcgacctctcgacgaggatgacatcgccctcctcaagacctacggtttgggaccttactcacaagcataaaaaaggcggagaaggaaatcaaagatatggccaagaaagtgaatgacttatgtggtataaaggagtctgatactggtttagctgcaccaagccagtgggatcttgtttctgataagca

SEQ ID NO: 87731 - DNA, 278 bp, Glycine max
  Clone ID: 700909311H1
tgtgaagcgtggtggggagggtgagaatcctgaagattatgttgatcccgagactccatcgggtgagaagaagcgtatggctcggcaaatggccaagcaatatagtccaactgccgtggagaaatcgtggtatgagtggtgggaggatcacagtattttgtggcagatgctaacagctccaaaccaccttttgtcattgttttgccccctccgaatgtgactggtgctctccatataggtcatgctctaacagccgcaatagaggatacaatgattcg

SEQ ID NO: 87732 - DNA, 279 bp, Glycine max
  Clone ID: 700909313H1
caagaggaaagaaggcaagactgaagacgatgattgagacagtgaacacaacacaacaccataaccttaaacctcttcttttctaatttgccatgtatctctgtttcatttctctgttacatactctccctccaatgtagtaggagaaaacaagcaacttttttttgccgccaatcgccatggccaccaccaccacccaatggagttccatttctttctctctcatccttctctccattgccctcttccaaaccctaacccccaattcccatccgccgc

SEQ ID NO: 87733 - DNA, 277 bp, Glycine max
  Clone ID: 700909315H1
ctctcttcacatatcatcatactaagatagtcagatacatcacccaataattaaattaaatacatgctagcactttaacagtactcctttctctaatatctctctcatattttcctttctgcggatattcagctaattaaactaagtcctaagatgactgagggaaagctagttgaagctgcagaagctcataagacacttcaggatttcgatcctccaaagaagcgcaaaaggaacaagtatgcttttgcttgtgctatgctggcctccatgactt

SEQ ID NO: 87734 - DNA, 268 bp, Glycine max
  Clone ID: 700909317H1
catggttcacgtcgttttcgccttggccaacaagaatgtctcctaggccatgcacaaggatgtctcggatttgcagtggttcggtacccttctctcggctccctctgccactgccactgccactgccactgcccgtaatgggtcgctgatgccctcgctgtcatctctgagtccaaggaggtccctcatgattggatcaccgatgccgtcattgatcaggttcttggtgatatagcttttcagaaatttggaaaaggtttaatttcat

SEQ ID NO: 87735 - DNA, 273 bp, Glycine max
  Clone ID: 700909318H1
ctagggtttgatttcgttgttcgattccgaaccaataatgcgacgcgaacgttaatggagaaagaaggagatgcattagtggatcctctcgccagctattggggactttccctctttcctcaaccatctctcccaccctccaaccctacaactcagaccaagatcttcacatcatccacactcacctcagatccatggccttgcggagtcctgcgaaactgatgcagcaggccaaatccatagtggatggtaaccctcaactgttcaacactg

SEQ ID NO: 87736 - DNA, 178 bp, Glycine max
  Clone ID: 700909319H1
ctccatatctagaaatgttacttcttccatggcacatgaaggctggctccatgtgtgaatttgccacgaaggagtgaactgcaggcctacgatcttccgggattgattctacggtatagtcccgagctcaggtaccgaatatcgctctgagctgactcatgatcaggaattccgtgag

SEQ ID NO: 87737 - DNA, 273 bp, Glycine max
  Clone ID: 700909321H1
gactctcacacagctcctgagaatcaagaccaatactcttctagaagcaatgcagattaaaagagaagataacatacaaatactcaaaaattttcttcagcatttcaagcaggttaaggatctgagtatcaaagatttgatggggagaacgtagaagaagaggaccctaacatggctgtgaacttgctaactgtggcaagcactggcaatgctgcttttcttgaggagcttctaagagcaggtttggatcctgacattggagactccaaaggg

SEQ ID NO: 87738 - DNA, 266 bp, Glycine max
  Clone ID: 700909323H1
ctctctctctctcacctttgttatacgtcttctccttttcagttctcagaggtcacgaccaccactacacaccgcaccataatcttggaaattagcgtctgaaagagttcaaaggacttccgtagatttaaattaaatatgaatatttatttcttctccttgtcactttcaagattatgaagaggaagttcacacagctacgggagtctatggggtttcaaacatcgcatagcactaaacggataccacagccaattttcagagca

SEQ ID NO: 87739 - DNA, 271 bp, Glycine max
  Clone ID: 700909324H1
tcagaattctctaaaagagatctttttctgctctttgaagaaagaagggtctttgcttgattttggagatgtctctgctctcagatctcatcaaccttaacctctccgataccaccgagaaggtgatcgcagagtacatatggtcggtggatcaggaatggacctgaggagcaaagcaaggactctcccaggaccagttagcgacccttcagagcttcccaagtggaactatgatggttccagcacaggtcaagctcctggtgaagacagt

SEQ ID NO: 87740 - DNA, 272 bp, Glycine max
  Clone ID: 700909326H1
gtttcttgtggttccatttccatctttttgctctgtttctgacacaagatggtgaagagagtgaggtctgattcgggtccattgtctctgcaaaagcacaaccattggtgtgtgaagttaggagtttcaatcttcttggtgggctcgcttttcgtcttctcttgtgggattcattcagtttctcatcggtggtagtggagacacctcctcctctggaagatgcaaaagcattgtcccctgttttctcttcctccgttcttcaggattctgat

SEQ ID NO: 87741 - DNA, 276 bp, Glycine max
  Clone ID: 700909327H1
gtcccctacctttcccacaggttaggccttcgtctttattacctgacctgtgctaccacccaatcacctttccttccattatttcattccattccatatctcaccattcaccaacaccaacacaaataataattcaattaactgcacaagatactccaaattagaagcttgtagttgttgataaactttgattggtatctccacattttttgtggtagagttgttgggaaaaaaaattcaccaaaaaaaaagaaagaaaaaagcatagagagaaag

SEQ ID NO: 87742 - DNA, 272 bp, Glycine max
  Clone ID: 700909329H1
atcaaactcatttattcaaaatctcttcaacacttccaatcgtatagttctcgtcttgcaagattagtcccagtaatgggttgtttgtattttcttagaaaggacacgatggaagaaaaggtaaataaggagcaccaggtttgacatcggatggagctattgatagccagggtcatcctgcagttcgagagaaaacgggtgactgggttgctgcaattttgattttagtgaatcaagggcttgctactttggcattctttggaattggagtg

SEQ ID NO: 87743 - DNA, 276 bp, Glycine max
  Clone ID: 700909330H1
cactgacctatcttggtagagatttgaagtttaaaccttcaaattaatcaaaccattttaatttgcctatagattctgagtcactgctgctatggcgctacgcgtacttcttgtgttggggatgttgctgatgttgtgccttgtaaggtttcatctgatccaaagatagaagaagaaatactggaagcagaagaagaactgcagtttcccgataacgagccacttatcgtgagagacgcgaacagaaggctaatgcaagatatggattgtggtggg

SEQ ID NO: 87744 - DNA, 279 bp, Glycine max
  Clone ID: 700909331H1
ctttattctcccaattcaaaactctcactccgttagaagcaccaaatcctgatggcaccaaaggcagagaagaagccagcggagaagaagcccgcagaggagaagaagtccacggtgggagacaaggctccggcggagaagaagcaaaggccggaaagaagcttccgaaggagggaggcgccggcggcgaagggaagaagaagaagagaaacaagaagagcgtggagacatacaagatctacatcttcaaggttctgaagcaggttcaccctgacattg

SEQ ID NO: 87745 - DNA, 259 bp, Glycine max
  Clone ID: 700908613H1
ctttagagaggaaacctagtggagaaaacaaccttgctaacggacaccattttgtcaagccacccatgttccagaggggggttctcagaaccaattgcatagactgcttagatcgcacaaatgttgcacaatatgcatatgggttggctgctcttggccaccagcttcatgctctgggaattattgaccaccccaaaattgaccttgatgatcctctaagtgatggtttgatgggattttatgagcggatgggtgacac

SEQ ID NO: 87746 - DNA, 264 bp, Glycine max
  Clone ID: 700908615H1
cttttcctcttcctcccattgaagcattttttcacaagcccgtgattttttcgctatctccatcatcaaatgatccgatgctgctagatcgaatttgacaaaacccacttcgtgtctgatcgaagcaacaactgggttctgtctgaattttgagataagatggaatcggatcttggcaagctcttcattgggggaatatcttgggacactgatgaggaacgtctaaaggaatattttgggaaatatggggaggtgatagagact

SEQ ID NO: 87747 - DNA, 266 bp, Glycine max
  Clone ID: 700908616H1
gacaactctcacctcctccaattccttcccaacaccaccaccagcaccagcacgcccaacacccccttcttccatgctgcacctcacactcacaccatgcaccaccccctctctactaattcctccaataatactaattactaccccttccacctctcccaaattaccgaaacaccctcccaccatgatagagcccttgctgccatgaagaaccacaaggaggctgagaagagaaggagggagagaatcaactcccacctcgacca

SEQ ID NO: 87748 - DNA, 216 bp, Glycine max
  unsure (1)..(216): unsure at all n locations
  Clone ID: 700908617H1
cagtatgtaatttctgtatgtatgcatgacatatacaagtggtaaatccaagtaaattctacagtgntcacggacactggacgcatcacgatgtctccgttacggacgagaggacccttctcttcggtgacaaggcagtcactgtttttggacacagaaaccctgaagagatcccatgggggtcaactggagctgacatcattgttgagtccaccg

SEQ ID NO: 87749 - DNA, 263 bp, Glycine max
  Clone ID: 700908618H1
tggcgatggtgttagtcacactgtgccaatctatgagggctatgcactccctcatgccattcttcgtttggatcttgctggccgtgatctgactgactctttgatgaagatcctcactgagagagggtacatgttcaccacctctgccgagcgggaaattgttcgtgacatgaaggagaagcttgcttatgttgccttggattatgagcaagaacttgagactgcaaagagcagttcttcagttgagaaaaactacgagcttc

SEQ ID NO: 87750 - DNA, 262 bp, Glycine max
  Clone ID: 700908619H1
cgcaatgtgatggagctgatgcgtgtttgtgaagctttcagaaatggatcggatccgttggagcgccaagtgagggaggacctccagaagataatggcatgtcgaactgaggggctcgattatcttggcacgccaagccatacagagcaatgaaaatggtgggttgttgatgagctatcagatgtacaaatttgcggaactgtgtacattttacatcttaccatctttttctgaggagtgactcggcaagataagcagacaa

SEQ ID NO: 87751 - DNA, 258 bp, Glycine max
  Clone ID: 700908620H1
gtccaaaacaggcagatgtttaacatcatctgtgagcttcccgaaactgttgctagaacactagttccacgcatgcgggttgttaagggaacaggcaaagctatcaattacttgacccctcccagaatcttacttgctttggtcactgcttggttacggcgaggtcgctggtttgatgatcagggaagagcattatatgcagctgaagcagaccgacttcgtaattgggctgaagatcgagcccgattttctttcacc

SEQ ID NO: 87752 - DNA, 260 bp, Glycine max
  Clone ID: 700908622H1
agcaaattaattagcttcaccatggactcattgttacttctaaaagaaattgccacttccattttgatcttcttgatcacttgtctctccattcaaacattcctcccaagctatcgcccgacactcccaccggggccaaaagggtggccagttgtgggtgcactccctctcatgggaagcatgcctcatgtcaccttagcaaagatggcaaaaaaatatggacctataatgtacctccaaatgggcactaacaacatggt

SEQ ID NO: 87753 - DNA, 260 bp, Glycine max
  Clone ID: 700908623H1
atagcaatctcatctcattcatttcaatggcaactcaaggtcaagtcattacctgcaaagctgcggtggcctgggaacccaacaagcccctaactgtccaagacgttcaggtggctccgcctcaggccggcgaggtccgtgtacaaatcctcttcaccgctctctgccacaccgatgcttacacttggggcggcaaggatcccgaaggtctcttcccctgtattcttggccatgaagctgcagggattgtggagagtgtt

SEQ ID NO: 87754 - DNA, 255 bp, Glycine max
  Clone ID: 700908625H1
cggcaccgtttttcggcttccttggcgccgcagctgccctcgtcttctcctgtctgggagctgcctatggcacagcgaagagtggcgtgggcgtggcttccatgggtgtaatgagacctgagctggtgatgaagtcgattgttcctgttgtcatggctggagttttgggcatttatggccttattattgctgttattatcagtaccggtattaatccaaaggccaaatcctattacctctttgatggttatgcac

SEQ ID NO: 87755 - DNA, 256 bp, Glycine max
  Clone ID: 700908626H1
ttaaaattttgatcatcatggcctgtgaaaatgacaaaaaaggccacctattacttgccctagggctagtgctctgcgtcaccctgaccttcttcccaagggtgaccgaaggagggtgccctttgcatgcgaccctaggaacgggctcacgagggggttcaagttctgcaacacgcacgtgccgatccacgtgagggtgcaggacctcatagcgaggctcacattgccggaaaaaattaggctcgtcgttaacaat

SEQ ID NO: 87756 - DNA, 254 bp, Glycine max
  Clone ID: 700908629H1
tcacacccaaagagaaaagaaaaaaaaaacaacagtggtacgtgatgccaccgaagttcgatccctcgcaggtggtggacgtgttcgtccgagtcaccggcggcgaggtcggcgcggcgagttctctcgccccgaagatcggtcccttgggactctccccaaagaagatcggagaggatattgcgaaggaaaccgcgaaggactggaagggcctccgcgtgacggtgaagctaaccgtgcagaaccggcaggcg

SEQ ID NO: 87757 - DNA, 259 bp, Glycine max
  Clone ID: 700908632H1
tagatttgtaatttttttttaatctgaggcactaaactaggctagagtgtttctcttttgttttgtggttatatatatcagcatctttcacttgttgatactctgttctctcctgcttgggcgagtgaagaggtgaaagcttgagagcatataaagcttgaggcctgatttctgcgtttctcggagaatttggcttcagaaaagacggccaaccaggggatttaggcctccggggttattcggccgtgaatgggggccc

SEQ ID NO: 87758 - DNA, 260 bp, Glycine max
  Clone ID: 700908634H1
ccaactcttttctttgttatattattctctttcactttctgccaacccttggagtcaacatgactatcctcattgagcaatctgatcactttggggctgaagtagaggcaaagactgaaccaataaatgagagagaactggtgttggatggtggatttctgataacacagaccaactcatttgggcacatgtttagggcttataatgatgctgaaagtgagaggcatgaaggagtggagaacttctacagaaaaaatcac

SEQ ID NO: 87759 - DNA, 256 bp, Glycine max
  unsure (1)..(256): unsure at all n locations
  Clone ID: 700908637H1
gtgaagacctggacccatgaccctttccatgttttgagagttgctaatctgaactgaagatagcgattgaggaaaaccagtagctactggctgtctgtccagagtgatcgatagctccgaaatcaagtcaacagcagaaggctnacaacaggggacaccatcaaattcactgcgtagaaagacgctagccatatacttcattgagtctgaggatagaacgatggcctttggtcgtgggtatccagcaggatctaca

SEQ ID NO: 87760 - DNA, 268 bp, Glycine max
  Clone ID: 700908638H1
tgcaagtgaaaccaccccttctcagaaaaaggctagagggcgccctcctggctctggaaggaagcaacagctagctgctttaggtgaatggatgaatagttcagcagggttggccttttcacctcatgttatcactattggagttggggaggacattgtggcaaaattattgtcattatcacagcagagaccaagggctctgtgtatcatgtcgggcactgggacagtatcttcagtcactctgcggcagcctgcttctaccaatgcc

SEQ ID NO: 87761 - DNA, 257 bp, Glycine max
  Clone ID: 700908639H1
gcctgattaacaacaggtgctcgggaagctgctttcagaaacatcaagacaattgctgaatgcttggctgatgaacttattaatgccgctaaaggttcatccaacagttatgctatcaagaaaaaggatgaaattgagacagttgccaaggctaatcgttaaaccaacaaaggatacagtattggtgaccagaaagattttgtttcgacctttgaacttcattttcaaatattgtgtactagttttgatggctttag

SEQ ID NO: 87762 - DNA, 254 bp, Glycine max
  Clone ID: 700908642H1
ctcgctcaaagaaagtggggatgatgattacaatgagaagaagatcaaggtaggggatttgagtcatatattatttggtgttgaaccgatgaagttgacgagtccatccactgatgctgaagttgcgctcgctcttagagtcttggaagggtgttgtttgcttcaccctcagagtacggctctcgcccatcaacacaacgctattcaggttttaatgaatatattatccactcgtggagtgcttgagcaaggtg

SEQ ID NO: 87763 - DNA, 254 bp, Glycine max
  Clone ID: 700908643H1
atcgagccgctcgagccgattcggctcgagtgttctccttctcagaaatcaagagcctcacctggggaactcaaggatcaaattgggccaaacatgaccaagggtgtgctaccgaacaatcacctgattgcagttaaagacctgaatgcatccatagaagaaaggaagttccggagtgctgttatgaagttgggcaacatccaccacaagaaccttgtgaagctggaaggttattgttgcgagtttaaccatag

SEQ ID NO: 87764 - DNA, 240 bp, Glycine max
  Clone ID: 700908647H1
cttctctgcaaatgcttcattccaagatggttaggactctgtaggctgataaagacaacactcataccgttggaaagaaggatgctgctggccatgttgcttaatttagttcttgcttcctttgtcttcttgagttttatcagagacgggagtgcagggatcactatctctttcattcggtcagagtggccggcagttgacatcccccttgatcatgaaccattggcaatcccaaagggt

SEQ ID NO: 87765 - DNA, 262 bp, Glycine max
  Clone ID: 700908649H1
agcaaagtttctccctaaaaaacgaaagccttctcaattcttgcaagttgcaacccatcatccatggcctcaagcaaacccttcatcactgctttccttcttcttgtgaccttctcaagcatgagtttgagcctagcatcatctcgtcacctcttgcaaacaaccacaacgccccatttgcctggcactcccactttgcctaacccaacaacactgccacctttgccttcaaaccctacactgcctcagggcaatgttcccc

SEQ ID NO: 87766 - DNA, 258 bp, Glycine max
  Clone ID: 700908650H1
gactttttcctcagtggaacaaacctcagaaaaagattttacaaattaaatattgtttaaaagaaagatgtcaagtggagcaacacactggtgttatgcatgcagacagccaattgtgcttgatgggagagatcctgtttgcccttactgtgatggaggatttgtgcaagaacttgacgagttgcgaggaattgcacccaaccataaccataccttttcgtcacagtcaggagactttcatcaaatgcctgacatttt

SEQ ID NO: 87767 - DNA, 255 bp, Glycine max
  Clone ID: 700908651H1
ctcgagccgcgctgtggttatcatcttcttcttcctctttcttagatctcttctttctctacgccgcacgccgaaaccatggccggaaaaggagagggtcctgctatcggaatcgatctcggaaccacctactcttgcgtcggtgtgtggcaacatgaccgcgttgaaatcatcgccaacgaccaagggaacagaaccacgccgtcttacgtcggattcactgacaccgagcgtctcatcggtgatgcggccaag

SEQ ID NO: 87768 - DNA, 258 bp, Glycine max
  Clone ID: 700908652H1
ctccgctcaacaactataagattatcttcttcttcttcttctcttcaattcttctccaatcccaaccgcaccctcttccgtccctttcttcacacttccttcaaaccacttccttcgtctttctctttccgaacagatcacactatggccacctcaaacgccaaatcagtccatgatttcaccgttaaagatgccaagggaaatgatattaaccttggtgactacaaaggaaaggtccttatcattgtcaatgttgcc

SEQ ID NO: 87769 - DNA, 252 bp, Glycine max
  unsure (1)..(252): unsure at all n locations
  Clone ID: 700908653H1
attttgtccggatgggaccgaacaagggacgatgaaatcagtgtggtggaaagaagttgtgtttgtgtttgtgtttggtgttgggacaattgatatcggtggctctcaaattgtgaaccgcacatatacccaccctgcctcccacgccacatcgtacccgctctngctccctctctctctctctccgctnctctctctctctctaagctctttcaagtagagactgtgtgtctatgtgctttgtcgcggagc

SEQ ID NO: 87770 - DNA, 255 bp, Glycine max
  Clone ID: 700908654H1
caacatttcacgcttcctctgtttgctcgcacacgtcgtttttttctttttgttgcttcggagccaactcaacaacaacgccgtgcctaatccttaagaataacgaattacaacaaccaaccatgttgcattgtctcaacacttcctgttcggacatcacagtcttggaaagacaacgggaagcaaccatcaagtgccagaaccaccaaccaccctacttaacggactttaacgccgtcttcccttcttcttctt

SEQ ID NO: 87771 - DNA, 256 bp, Glycine max
  Clone ID: 700908655H1
gccaatttagatgtgttcgtattctccactccaatagcaacatcaattccaattctgatttggttcggaaagaagtgaagtcataagtaatctctcctctcttgtaaacatggcagccgaaacggaaccaaagaagatcataattgataccgaccctggcatcgatgatgctatggcaatattccttgctctacaatcacccgaggttgaagttattggactcacaaccatctttggaaatgtgtacaccactctg

SEQ ID NO: 87772 - DNA, 255 bp, Glycine max
  Clone ID: 700908656H1
aacccttgttgaaccttccttcttctaacccaagtcgcgcgcacgcagcacctcttgcttcttcttgaaccctagcctcttcgttgttgttccattgaatctcttccacattgaagcaaccgtagcctcttcgtcgagttccttccgacgagttcgaccttcccggctggaacttccgaatcaaggactgccagcagggcgttcgctccaacgtcggcaacaaagacattggtctcacttcgaagaaaccaggga

SEQ ID NO: 87773 - DNA, 193 bp, Glycine max
  Clone ID: 700908657H1
cattacaactcccagaaacttatatgggtcacataataacgatttgagtgcttatgatcaataatgtctatgtaaaagttattctagatgtagtggaattggtaagatttccctgtaacttcgttgctttgcaaatggtgagaaacccatggatgtcaccccagggcttagcatgcatagggacttgtatctt

SEQ ID NO: 87774 - DNA, 254 bp, Glycine max
  Clone ID: 700908661H1
gaaagagaagcattagcaaaagcaagaagaactagtctaagcagaaatggcctcttcagtgatggcatctgtggccctcaaacctgcccctttcactgttgagaagtcctcagttagaggccttccctccctctcaaggaactcctcttcattcagagttgtggccagtggtggcaagaagatcaagactgacaagccttatggaattaatggtggcatggctttgagggaaggagttgatgcatctggcagga

SEQ ID NO: 87775 - DNA, 260 bp, Glycine max
  Clone ID: 700908662H1
agcttatctcagcggcagactctgaaagctgtttgagtagcctcaacccggagaatagcaccaatgggagaggaggaaaacaaaccagaggaacccatggcaaaggagaaaaacccagaggaagaagcaacccaagagaaaaaaccggagcttgagtccaaagaggaagttgctgctgctgctgctgctccgccaccgccaccgccaccgccaccgcccgagattgtgctcaaagtgttcatgcattgcgagggttgcgc

SEQ ID NO: 87776 - DNA, 220 bp, Glycine max
  Clone ID: 700908663H1
caaaaacaaagtaagagttcactcaatctcactgtgttgtgagttgtgtgtgagcaccaaccaacaatggtctctctgactccgttatgtttctttattacctcgttgatcgctggtgcagacgcagcggcggagccccaaacggtgcgttttgacaccggggggttgagcagagacacctttcccaaaggattcttattcggaacggccacgtctgcgt

SEQ ID NO: 87777 - DNA, 256 bp, Glycine max
  Clone ID: 700908667H1
gaagattttcaggtgtctgagggatctggtgatgaagcagaagcttctgcaccaccttcttttccagaacttgaattgaaaattaaggacttcattgagtcccttgggggtgcagtcttccctaagctgaattggagtgccccgaaagattcagcttggataagcacctctggtacccttcgatgcatcagtttcagtgagattgcacttttatttcgagcatctgactcattggtccatgatttgtgccatgctt

SEQ ID NO: 87778 - DNA, 252 bp, Glycine max
  Clone ID: 700908668H1
tcgagattgaagaagatgatgcaggctggacccggcggcatggcccaacaagcgaaccaacaatacgcacagcaacagtaaccaccctacatgatgatgccgccgcagcctcagccccctcagatgtgggccacatcggcccagcctccgtcccagtcggtggctcctccgcaacccaccagcgccgattatgtccgtaccctctggatcggtgatttgcagtactggatggacgacagatatctctacacc

SEQ ID NO: 87779 - DNA, 254 bp, Glycine max
  Clone ID: 700908670H1
tttcagtctaacccggatttacttagttagttgggacttgcttcttagcgtgtagtggatcatccaggctagctttcctgtagtagaacgcggggagcttgaccatcagggtcttgaatagggtgtgccttttagatcttttagtaggagtactcttgaatgtactatgcagtaggttctctgtgcccttagatcccaatcccagatcgggttccaatcgcagaagtgttttcatgcgaatggctaatactcat

SEQ ID NO: 87780 - DNA, 222 bp, Glycine max
  unsure (1)..(222): unsure at all n locations
  Clone ID: 700908671H1
cacgacacgaatccatgaggagttcagagtgacccacgtcaccagcttccgaatccaactccattccgcaaaatggtactttcttcaacgatggttgagaaatcgacgctagggcgcttccacgatcaaatggtcatcctntgccgatgggatccctcgatcttcacctcgcacaagattcgcgtgaccatgctatggatcgccgccttcgcattcgttttt

SEQ ID NO: 87781 - DNA, 255 bp, Glycine max
  Clone ID: 700908672H1
gcagagctcaaaaccctagagaggaggaagagagagcgtgcaagttccggccaccaccgaccatgacattcaagcgcaggaatggaggtcgcaacaaacacggccgcggccacgtcaaattcatccggacctccaactgtggcaaatgctgtcccaaggacaaggccatcaagaggtttctggtgaggaacattgttgaacaggctgcagtcagagatgtgcaggaagcttgtgtctatgaacaatatactcttc

SEQ ID NO: 87782 - DNA, 253 bp, Glycine max
  Clone ID: 700908673H1
cggagaacgagaaaaaaacggaaaagaaggaaaacgtggacccttccgtttcgagcggaagtggaaggagttccaagaggtgggttttcttgagggatttcttaagaagcaaaagcgagggaaggagtaataacaagttctggtccactatttccttttcccccgccgcaaaggacaagaagccccaaaatcagggaaatgggccgcagaagcccaagaaggtcgccggaaagcccactaacggcatcgggaa

SEQ ID NO: 87783 - DNA, 248 bp, Glycine max
  Clone ID: 700908675H1
gcaaaacctctcttcttctgattgattcacttctcgatttttctgttttcgttttcattttcggtttccgatctaatatcgatgcgattcgccattgccggaaaatgagtcctccggcgagtgtccggtgatgatcgctctcgagagaggctgttgttgttgttcttcttcgacgtcatggttttgttctgagattctgctcactttcaccaaaacggctttactatttaccgcgtttcgctttcgtg

SEQ ID NO: 87784 - DNA, 250 bp, Glycine max
  Clone ID: 700908676H1
agaagttctaaggaagagggaatatgcagaatacaaggtgctagttgtctatttgcaataacaacatcagcgatccaaccttagtattcttcaacccagagagatttgtaataataaattacaacaacttaaacgatggcaggaggagcttatgtagattcgggaaatgcaaagcaatttgatgggaaggtcacggcattcgtattggttacatgctttgtggcagccatgggaggcttactcttcggtt

SEQ ID NO: 87785 - DNA, 255 bp, Glycine max
  Clone ID: 700908677H1
aagagatctctttgaggtttctcatcaaacacctttagccaacaacaatggcacctttgaacaaagttcttttgctcctcaccttattgttccctgcggtggatgccacatacaaaaacaagaaagacaagaagaacagtgtttttcataagattcccaaatttccaaaatttccagttcctatcattggcggtgaccagaaagttgttgtggatggtggtaatcatgccattgccaagcccgattttgaaacaa

SEQ ID NO: 87786 - DNA, 253 bp, Glycine max
  Clone ID: 700908679H1
cttgtgttgtgatagagtcttacagagaagagtgtgtgtgtgtgacaattgggataagctctaatcaatcaatttcaatggcatcatccaattcgactcagcaagaagggaacaaacccgcaaagagaaaacccgtgttcaccaaagtggatcagctcaaacctggaaccaacggtcacacgttggtggctaaggtcttgtcctccgacaccgtcgtacacaaaccgagaccctcttccgcacacaacctcaa

SEQ ID NO: 87787 - DNA, 254 bp, Glycine max
  Clone ID: 700908680H1
aaggttttcagccatcctgatgttgttgctgaagtgccatggtacggtattgaacaagaatacaccttgttgcagaaagatatccaatggcctcttgggtggcctgttggtggtttccctggacctcagggtccatactactgtggtgttggcgctgacaaggcttttggccgtgacattgttgacgcacactacaaagcctgtatttatgctggcatcaacatcagtggaattaatggagaagtgatgcccgg

SEQ ID NO: 87788 - DNA, 249 bp, Glycine max
  Clone ID: 700908682H1
acaaattgtggtcaggttcatatatatggcgaatacactgtatataaggctaggacgaccaactctggacccaccagcagactaaacggataagggtctttactacttcctttcaaaccttgaccagaacatagcacatccagttcgaacggtttacttttataataagtctgcatgtagagggaacgaggaagcagcacaagtaataaaggatgctttgtcgaaggttcttgttcactattaccctat

SEQ ID NO: 87789 - DNA, 237 bp, Glycine max
  Clone ID: 700908684H1
caaggggcaggagcaaaagcttctggatgaaattgatcggctttcagcagaactccacgactgtgatgcgaacatacacagacgtaacatcagacattactacattggaatctctcatctctcagtcacgtgaacgcactaatcgttacacagacgagacagactagttacatggggagagacagtccctatggggcaaagagattgaacttactgctgacattgataagctgagag

SEQ ID NO: 87790 - DNA, 217 bp, Glycine max
  Clone ID: 700908685H1
acaatatcagcaatggccatgatcaacgccaaatgcgtcaacccaaagttccccaatcccaccaagctcgcaccatcaaaaccctcccttcagatcaaccttccaagggcctcatagcctcaccgaaagcatatactttccccgcgaagccatgcagagcatatcacaacctcgacctcgagcgatcgtgtcaacaatgcgactagcaaaggcacgc

SEQ ID NO: 87791 - DNA, 247 bp, Glycine max
  Clone ID: 700908686H1
cagtcggagaggggggatcgggatagagcggcgccggcgccgtcgttgcaccggtcgctgacttcgacggcggcgagtaaggtgaagaaggcgctagggctcaaaacgaagtcgtcgtcgatggggagtagcaagcgtgcggcgacgacggtggagttggtgagagtgcagatgaggatttcagagcagagtgataccagaattagaaaagcattgctcagaattgctgcatgtcagcttggaagac

SEQ ID NO: 87792 - DNA, 203 bp, Glycine max
  unsure (1)..(203): unsure at all n locations
  Clone ID: 700908687H1
cacacatcctcaaccatggcagcaccatcttcagcgacaaagtcaccatcatcctcgaacacgcagcttccgctgacaccactccccggcagctacggcctcccgttttttggcagcataagcgcacagacacaacctacttctacacaccaagcgacgcgtccacgnttcttcgacgacgagagattgcaaacacacaactc

SEQ ID NO: 87793 - DNA, 228 bp, Glycine max
  Clone ID: 700908688H1
ttcgtttctgaaattctcccgagatggacgagaacgtgctcgacgatattatccggacgctcatcgcggcgaagaacggtacgacgaagcaggtgctgcttaccgaggcggaaattcgtcaactctctgcttcctccaaagagatctttctcagtcaacctaatcttctcgaactcgaggctcctattaagatttgtggagatgtacatcgccaatactcagatcttt

SEQ ID NO: 87794 - DNA, 247 bp, Glycine max
  Clone ID: 700908690H1
ttcacattttagaagaataccccctcttttgctgcatcagaggagttgtaaattaagagcatggctgcacaagctcttgtatcatcatcttctcttaccttctcagcggaggctgcaagacaaagtcttggaccaagatcactccaatctccatttggcttctccagaaaagcctcctttcttgttaaggcagctgtaagccctcctgtcaagcaaggatcagacagacctttgtggtttgcatcaa

SEQ ID NO: 87795 - DNA, 249 bp, Glycine max
  Clone ID: 700908692H1
cacttaagccactgtgtggaactaacaacaacacaaggccatcatcatggcagctgcttctcctatggcaagccaactcaagtccaccttcactaaaactcttgtagctcccaagggcctctctgcctcttcaccactccacctcctgccttctaagaggcaatttagcttcactgttagggccatccaatcagaaaagccaacctatcaagtgattcaaccaatcaacggtgatcccttcattggaag

SEQ ID NO: 87796 - DNA, 256 bp, Glycine max
  Clone ID: 700908694H1
tgtgccctccctctttctagctatttccctctcttaacacaattaacaaccctatatcatatcatatcaactccaaatgatgaaaaatattgggttgtttcttcttgtggtggtggctacttttgtggtggcagccacagctggtagcttttaccaagactttgaaataacatggggtggtgagcgttgcccaaaatctatgaaaatggaaatcttctcaccctctccctagacagagcctctggctctggctttc

SEQ ID NO: 87797 - DNA, 259 bp, Glycine max
  Clone ID: 700908701H1
ctcgttgattcggatctagagtcttttttcactcttcagttctcgttgttgttcttcgctttcctgaaactagggttttcaatttcgattcattcgttaataattaaagatgtttgggagggcaccgaagaagagcgataatacgaggtactacgaaatcctcggcgtctcgtagaacgcttcgcaggatgatctgaagaaggcttacaagacagccgccatcatgtatcaccctgactaaggcggtgatcccgagaag

SEQ ID NO: 87798 - DNA, 257 bp, Glycine max
  Clone ID: 700908702H1
gcagacttaacaacagcacaaagcgggttactgtctgttcaagctaccatctctctctctctttcttagtgcctccttgccagaagttaaaatggcccaagaaactttcctattcacatctgaatcagtgaacgaggggcaccctgacaagctctgtgaccagatctccgatgctgtgctcgatgcatgcttggagcaggaccctgacagcaaggttgcctgtgaaacctgcaccaagaccaacatggtgatggttt

SEQ ID NO: 87799 - DNA, 256 bp, Glycine max
  Clone ID: 700908703H1
cgcactgtgtaatgctatctacgatggctctctctgcgcatatttgccgtttccccgccacgcgcgctgacactgctttgccggagactctcaccagaatccggtgccagaagcctctctctgtccgatgctctggcgattccccttccggctctgtgggttcggagttcgatccgaaggtgtttcgtaagaaccttactcggagtaagaattataaccgcaaaggatttgggtacaaggaagagaccctccaact

SEQ ID NO: 87800 - DNA, 243 bp, Glycine max
  Clone ID: 700908704H1
gaagtatatccctagggaaaaataatttcttcacatttacaatgaagcaatccactctattcctgttcctattcctattccccctcgttcatgctctttcttacgaagctgcttatattagagatggcctcaaatcctattcccagcttgatctccctcactccgtttttggttctgaaagtgtagccttcgattgccatgggaaaggaccatatgttggagtgtctgatggtagaattctca

SEQ ID NO: 87801 - DNA, 254 bp, Glycine max
  Clone ID: 700908705H1
ctccttcgttctgaaaatcgtagatttttgttttagggtttctcttatataatcttttcgtaacacaaaaaaaaatcacataaatcttcctttatatttattactatttcgttttttctttggattaattaactaggcttgagctatccgaataataataataatagtttcggagaatggaaaagaaaaaggtagcagttcccctcgtgtgccacggacactctcgccccgtggttgatctcttctacagtccc

SEQ ID NO: 87802 - DNA, 249 bp, Glycine max
  Clone ID: 700908706H1
gtctccattgcccctcgctctctctattggttcacgcgcggcaattggagattcacgcgccaccatggcctcaccaccgacactccctatctcctcccaatccagcgcctccggcggctccgcctcgcagtcccagcctccgatcgcaacgccggcgttccgcgccttcatctcccgcatctcctcgtccctccgtcacgcctttgcgcacgccgcccgtgggcggactcatcgaccggagctccatgt

SEQ ID NO: 87803 - DNA, 245 bp, Glycine max
  Clone ID: 700908711H1
cttctttattccttttgtaatttcattcattcttaatctttgtgaaaactaatgttcatcgagaattttaaggttgagtgtcctaatgtgaagtacaccgagactgagattcagtccgtgtacaactacgaaaccaccgaacttgttcacgagaacaggaatggcacctatcagtggattgtcaaacccaaatctgtcaaatacgaatttaaaaccaacatccatgttcctaaattaggggtaat

SEQ ID NO: 87804 - DNA, 249 bp, Glycine max
  Clone ID: 700908713H1
gtagtgtgtggttgaaagttaagaagtagcaaagatgtttccattcgggcacaagggtcaaaagataaaggggactatggtggttatgcagaagaatgtgttggatatcaacagcatcaccagtgttgacgggatcgtcggcaccggcttagacttcttaggcagtgcactcgatacagttacttttttagcctcctccatctccatccaacttattagtgctaccaaggctgatggtgggaaaggaaa

SEQ ID NO: 87805 - DNA, 257 bp, Glycine max
  Clone ID: 700908716H1
ctccgctggatttagagattggtcttccttgatgatgagtttttgcagtgaagaagatgaagaatctaccaaagggaatgagtatttttctaggcaaaggaatgtgatacagacgaagggcttccgcataaaaagtatcatgagcagtcaaatggatgctttggctgttgcagatagaggaataagatttgttttgcttccggaccctatatttgacaagtttgagcagcaaaagagagcatagatgctggatatat

SEQ ID NO: 87806 - DNA, 262 bp, Glycine max
  Clone ID: 700908717H1
ctctcccccacctttgaattaatccaccttctctcccaatccaccaccgacacctacttccctcccaataatgccgccaaccaaccttctctcggccacgccaccgccgtgctcaagctgcaaaaggtctaccgtacccgccttgcaggttggccgactccgccgttgttgccgaggaggtggcaagccatagactatgtaagggtaaaccacagcaccatctcgttctttaatttgccggaaactgctgcgtcgtgctgga

SEQ ID NO: 87807 - DNA, 254 bp, Glycine max
  Clone ID: 700908718H1
aaagaattgaagaagtggttttaatattttaccaccatgaagctctaattatacttgccaacatttgtaatggcaagtccaataattagacatggtggattatttgtttgttgtttagtgtgtaacaatatgtagtacttttccctcccaataatagaatgtcaagtcttgcatatatttttcatctctctagttcattattaatttgactcagatcaagaacttttacttttgtgttattatgcaaaaacttg

SEQ ID NO: 87808 - DNA, 255 bp, Glycine max
  Clone ID: 700908720H1
gcaactgcgattttggatcggaacctcttcagcggcgtagcaatgggacactccaacgtttgcaattctcatccaaaaaactacggtcctggttctcgcacttgccgagtgtgtgggaatccacatggattgatcaggaagtatggccttatgtgctgcaggcagtgcttccgtagcaatgccaaggaaattggcttcatcaagtatcgctaaaagagctgttgtcacctacggaccaatattatgttctggcac

SEQ ID NO: 87809 - DNA, 251 bp, Glycine max
  Clone ID: 700908721H1
caatttgctttcgtttgttgttgttgttgtttctgttccttctcttgttccttaaactctttgtttcaaacatccttagaaaaggtaaaaatttaaaaaaaagaaaagaaaatggtggctgtggtttcccaagaaaatgttgcggcattggtttaacgtaccggtagggagttgcaacgttatagaaaaggtcgtcgccaagttgtgggatgcataccgtacagatttaagattggggagaagacttcctt

SEQ ID NO: 87810 - DNA, 251 bp, Glycine max
  Clone ID: 700908722H1
cacaaaccaaaaacccaacaaaagaacgttcatttttcattttcgtttctaatcaagagcatggccggtggttctatcaagagacattctttctccgaagaggaccatggtttcgcttcttccatggagcctgggtattctgggcacaaccaccacttccatcatggtttcgtgtctaggactttgggttatggcactttctacaaccgaggtgttaggagccattcgattttctcgccgagatctgggag

SEQ ID NO: 87811 - DNA, 247 bp, Glycine max
  Clone ID: 700908723H1
gaaagaagaaaacaatggctgttgccaacaatgtgctttgcattgctttcattatcactttaacgtgggcagttgaagctcgaattccggggatttactctggtggtgcatggcaaagtgctcacgccaccttctacggaggatccgacgcttccggcaccatggggggaacgtgtgggtatgggaacctgtacagccaggggtacggtgtgaacacggcggcattgagcacggcactcttcaacag

SEQ ID NO: 87812 - DNA, 241 bp, Glycine max
  Clone ID: 700908724H1
tgtggtcaaaagtcccctgttgaatattgaatgttcacaagctttggtcaatagtcatggtgcggtatcctgccaagagaaatgtagcccagttgtatccgtgactctggtgagacaggttgataaacggaatgatgagagaaagagaattagcttgagcaccgagagtagtgaatttctgttttcagatgtgattcctggaaaatacagcctggaagtcaaacatagtgcccctggatca

SEQ ID NO: 87813 - DNA, 248 bp, Glycine max
  Clone ID: 700908725H1
agaaaaaatgggttcttcttcttctatgtggacggcctgtgtgatttcggcatcactggcctctgcagcactctgtgccaacccacgcaggccagtggatgtacaatttggccgaaactacgtgcccacatgggcctttgatcacatcaaatatttcaatggtggttctgacattcagcttcatcttgacaagtacactggtactggcttccagtccaaagggtcttacttgtttggtcacctcagca

SEQ ID NO: 87814 - DNA, 248 bp, Glycine max
  Clone ID: 700908726H1
cccaaaaccctaggtagagagctcttcctcactctcattcgcaatggccgcagcagcacgtcctctcgtcaccgtgcaggccctcgacagtgacatggccaccgacgcctccgccaccgtccctatccctgacgtcatgaagtcctccatccgcccggacatcgtcaacttcgtacactccaacatctccaagaacagccgacaaccctatgcagtcagccgccgcgctggccaccagacttccgccg

SEQ ID NO: 87815 - DNA, 243 bp, Glycine max
  Clone ID: 700908727H1
tcttccatgccttcataacatgcataatcttcgccttctccggtgctaccaatgcatgttatgaaggcatggaaggttcttgggcgacccttgaaccttccatgccttcataacatgcataatcttcgcgctctccggtgctaccaatgcacttgtggcattcaataagtcaagattttctaggctttgtgggtattatgcaatggcttctaacgcttctgctttggcaattctcttgtgggc

SEQ ID NO: 87816 - DNA, 246 bp, Glycine max
  Clone ID: 700908728H1
gttactttgtgacaaatggagggtccttagttctgtttctctttcttctctctgttctctcaaccaagttctcaattcaatcttcttcacacttttgatctgctaattctcaaggtattcaaaattgggaggttttcgtttgaattgtgatgtccaagccactgctaggcataggggaggaggaaggtcaaagcaatgtcactttgttggtttcttcctcagtcatcatggaacgtgtgtgcctga

SEQ ID NO: 87817 - DNA, 249 bp, Glycine max
  Clone ID: 700908729H1
cacagaaattaagctagagcttcatagtttcttcttcttttctcaccttccttctctcccttcagacaaagggacaaaaaatcagtgtgtgagagagagagagagaaattccaaaaccatgtcccacagtcatctaagtttcgcctttgggattctaggtaacattgcctccttcgtgtgctttctggcaccactaccaacattttatagagtttgtaagaagatatcaaccgaaggttccaatcaatt

SEQ ID NO: 87818 - DNA, 250 bp, Glycine max
  Clone ID: 700908730H1
aatacactggcctttcagatgcatatctttctgttctgaaggcacttttacatgcttctgttgctcgaaaccgtaaacttattgtggactgggctccagctggggatcttgaagaagctacttataatgaggatcctgaggcgcataaagctgctttgagtcttttaaagggtgctaatggggttctagttccaggaggttttggtgatagaggagtgcaagggaaaattcttgctgctaagtatgctcg

SEQ ID NO: 87819 - DNA, 251 bp, Glycine max
  Clone ID: 700908731H1
cgcgaaaaagacaaaggggtttgtatgtgaatctgatcatctagagttgagaatggaaggagggaaacgaggcacgattctggtcaccaacgacgacggaatcgatgctcctggcttaagggcattggttcactccatcgtcaacgccaaccttttcaacgttctagtgtgcgctcctgatagcgagaaatcagctgttagccacagcatcacttggctccatccagtagctgttaagcaagtacagatcg

SEQ ID NO: 87820 - DNA, 258 bp, Glycine max
  Clone ID: 700908732H1
gcgtcgcctccttcaagattctgagcttccgtcatgggttgatcaacatagactccttaatgaaaatgccggtccattcaaacgcaagcctaatgttactgtagccatagatgatagtggagatttcaaaagcatcaatgaggcattgaagcaagtgcctgagaaaaaccgaaagccatttgtgatctacatcaaggagggcgtttaccaagagtatgttgaagttacaaaaaaaatgacccatgtggtgtttattgg

SEQ ID NO: 87821 - DNA, 255 bp, Glycine max
  Clone ID: 700908733H1
agtcttagtaacatcaagacttggcctgaggacattataccctagcagcctgttggtcgcttggtcctgaataagaacatagataatttctttgctgagaatgaacaacttgcattttgccctgccattgtggttcctggtgtatactactcagatgataagatgcttcaaaccaggatattctcttatgctgattcacaaaggcacagacttggaccaaactatctgcaacttcctgctaatgctcccaagtgt

SEQ ID NO: 87822 - DNA, 250 bp, Glycine max
  Clone ID: 700908734H1
gaggaagatgattcagcttctgttcacggtgatattttcggaggcttcgatgatagcgttgctgctgttcaagacccctttgaggaagctcgtgataatgggcttggatcggttgtctcgatgtactggaccacttgataggtgaagaacgtctctgggaacgttctcgttgtgttgttgtatacagtgtagagcatgtagaatattcagaagcttgggatccaagacggtactgttgttaaccccatcg

SEQ ID NO: 87823 - DNA, 250 bp, Glycine max
  Clone ID: 700908737H1
attctctttgcgcagttccctacctctcctttcaagatgcagatcttcgtcaagaccctcaccggaaagaccatcacccttgaggtggaaagctctgacaccatcgacaacgtcaaggccaagatccaggacaaggaaggaattcccccggatcagcaacgtctcatcttcgccggaaagcagctcgaggacggccgtaccctcgccgactacaacatccagaaggagtcaactcttcaccttgtccttc

SEQ ID NO: 87824 - DNA, 247 bp, Glycine max
  Clone ID: 700908738H1
ccttggcctagccagctagcgcttcttctctcgcattccgtggagatctagtgctgccaaacctcgctgaaaattagggtttcgtttcggaggtagacgaagatgttcggaagggcaccgaagaaaagcgacagcatcaggtactacgaaatcctcggcgtttcgaagaacgcttcgccggatgatttaaagaaggcttacaagaaagccgccattgagaaccaccctgataaaggcggtgatcctg

SEQ ID NO: 87825 - DNA, 244 bp, Glycine max
  Clone ID: 700908740H1
aaaagagcactgaccaaaccattttattttatttttgaatcaagggtgagggccttccatggcttccgcttgtgcttcctctgcaattacagctgttgccatctctacgccgagttccgggcagaagaatggatcaggaggttgttttcttagtggaaggaaattgagggtgaaaaaggagagagcagcaattggaggacgatcgatgggcactacagtgtgcgcagttgctgagcctgacaga

SEQ ID NO: 87826 - DNA, 248 bp, Glycine max
  Clone ID: 700908741H1
gcaggatgccgctgatgctgctagaagtgctatggttagtgtgataggactggactcagagaaggtccaacaattgtgtgatgcagccaatcaggaagttcctgaagctgagaaggttcagattgccaattacctgtgcccaggaaactatgctgtctctgggggattaaaaggagttgaagtgctagaatccaaggcaaagtctttcaaggctcgaatgacggtgcgcctagctgttgctggtgctt

SEQ ID NO: 87827 - DNA, 245 bp, Glycine max
  Clone ID: 700908742H1
catggcttccttagactctctcgatttctccctcttccgtctcagcactgacttctgctctccttttgccattttcgttcaggcgcagggatgtataataaacctaatccttgcttttgggtgggcttgtgctgcatttgtcaggaaccgagaaataaatagaataaagaagagtatgcggaatggcaataactttgcattcctttgtcatgatattagtgaacttgagcactccaatcaggctg

SEQ ID NO: 87828 - DNA, 246 bp, Glycine max
  Clone ID: 700908743H1
ttcttccccctccacccacccagcatatctctctattcctatttattagcacccctcacattaccttgtgtcaccaactactttgactcctttaccataccattacaataattatcaaacctaaccagtaaaaatggtgaccgtggaggaaatccgcaacgctcagcgttcccatggacccgccaccatcttggccttcggcaccgccacgccgtccaactgcgtctcccaagccgattaccctga

SEQ ID NO: 87829 - DNA, 242 bp, Glycine max
  Clone ID: 700908744H1
tttcaatttctctctcttctgctctcactctctcacttgggcaatcatcagcagctacaccaccatgtccatttcgcttttagtgtttgcttcctcttccctctccagtcctgccaaaaccaagttcctgccctcactttctagattttctgtcaagcgtctctgcttcctttcccatactcgtccgcacatttccgtgttttagcgctccgtgaacctgttgaatagactcgggtgtagca

SEQ ID NO: 87830 - DNA, 250 bp, Glycine max
  Clone ID: 700908746H1
gtttctttcttcaacgtttccatcatacacagatcccaatcctctctcaagccctaatttcccctcatttccatggccacagaagagcccactgtcgcggtggaacccgctcccgaacctgcctccgccgatcctcccccggaggagaaggaggagaccaaacctgaagccaaggctaagaaaaccaaggagcccaaacctaaaaaggtttccagacctcgcaaccctcccactcatccttcctacgaag

SEQ ID NO: 87831 - DNA, 251 bp, Glycine max
  Clone ID: 700908747H1
atttgtttgagattattttaacttatttggtagtgttgaatttgagattttttaagttattttttttggaggcaattttttttagtcgattaaaattattataattgataaagtttttcgtccaaataattaatactatctatgtaagccaaaggtgcggaaaatgagtagtaaagcatagaaaacagtaggagtaaagagaaaaaggatgaggtagagagaaggtgggagtggcagagagaagattacaa

SEQ ID NO: 87832 - DNA, 253 bp, Glycine max
  Clone ID: 700908748H1
attgcaacggacttggatcagttcacaaaagatctcaaaaacttgatgaataccttaaaaggcaaagctgcatcaggtgactctcgtctcaagtatgatgtaggaagcatacctggtcctgataataagcacatatatggtcttgttcagtgcacaccggacttgtcagggtcagagtgtgatgattgcttggggcggtccattcaagtcatcccaacagattgttgtgaaagcagaacaggtggtaaggttg

SEQ ID NO: 87833 - DNA, 253 bp, Glycine max
  Clone ID: 700908750H1
cctctctctctttctctttctctctcatccagatcttgcaaaaagcaaaagacccaatggcatcgagcgcgcccactccaggcgaagagttcgtgtacatggcgacctgtcgaaacaggccagtcgctacgcggagatggtggagttcttggagacggtctccgcctccgccgaaaccgaggacctgaccgtggagaagcgaaacttcctctccgtcgcctaaaagaacgtaatcgctgctctctgcgcctcc

SEQ ID NO: 87834 - DNA, 243 bp, Glycine max
  Clone ID: 700908756H1
cactttcctccctcttcttcttttgcttctgtttttgaggcgaagaaggatggaattgtaatgctgggaatataattggagaattgggggaggagtaagggaggaaatcatacacaatgcccgagttccccttgagctcgaggttggaaagggtgcaaaatagcttgagagagaatggttctctggtgtatctcaatgtgtatgatcttacacctgccaacaattatctttacgcctttgggg

SEQ ID NO: 87835 - DNA, 241 bp, Glycine max
  Clone ID: 700908758H1
gtgaagcagtgtagggggaagaatctcttcttcagcactgatgtcgagaagcatgttgctgaggctgacattgtgcttgtctcggtgaacacaccgacaaagactcagggtcttggagccggtaaggcggctgatctcacatattgggagagtgctgccaggatgattgctgatgtatcaaaatcggacaagatcgtggttgagaaatcgaccgtgcctatgaaaacagctgaggcaattg

SEQ ID NO: 87836 - DNA, 244 bp, Glycine max
  Clone ID: 700908759H1
tgctgataaggccattacacaaaattaaagtgagattccaaatctagatcaagaaaggacaaaatataacaacagaagattatatttcgcctaataattatactaattaaaagcacactttgtagaagcaattttgttttatttcttttcatgagatttacaaatatggggtcgtcctccacttttagaccttgaccatgagaagatttggcaatttatgcagggattaaaccttgttctgagg

SEQ ID NO: 87837 - DNA, 240 bp, Glycine max
  Clone ID: 700908763H1
aatgatgaaatttggaggggtgtgtgaatgacccttttcccctgtgaggatttgggaaattggggtggagtaaagttgttaactttctcagagaccatgcaggtgcattgagcttgtgttcctggttactctcctctcacttggttttgttttgtggcaagtttgaaggatgatgatctgtatagagagctgtggaagctatgttcacggccattggtggatgttcctcgtaatggggac

SEQ ID NO: 87838 - DNA, 254 bp, Glycine max
  Clone ID: 700908764H1
ctttcgcttttgcttcctaggtttttttttttgtgtcgatggcgggaaaaggagggaaggggcttgtggccgggaaaaccacggcagcgaacaaggacaaagacaaggataagaagaggcccgtctctcgttcatcccgtgctgggatccagtttcctgtgggacgtatccacaggcagttgaagcaaagggtgcaagcaaatggacgtgtgggggcgactgctgctgtgtacttggcctccattctggaatat

SEQ ID NO: 87839 - DNA, 256 bp, Glycine max
  Clone ID: 700908765H1
agaatcactcccttatccatttccacaccacatcatagttcacaaccaacgctctctcttcagcctccattctacgctctctcaactggcagactctgacgcgaagatcgaaccataatggaagagtaaattaccggataccgaataaccgtttctccgtgaaagcctccgccaaagagattgcctttgaccagcattcccgctctgctatgcaggccggtattgacaagctcgccgacgctgttgggctcactct

SEQ ID NO: 87840 - DNA, 251 bp, Glycine max
  Clone ID: 700908766H1
ccctttcattcttttatgattcttcactcaatttcattagaagctgcttctgagataaaaatatcagcttttgtagttcacactctagttgcttctgcaaaatggtaggaagtgttgatgttctagctcatgattccagcattaatggaacaatgaaacagtggcctgaagatttcagttccatgacgattatgagagatcatgtgacactcacaattggagagaatggcattggcaatggggttgttcag

SEQ ID NO: 87841 - DNA, 250 bp, Glycine max
  Clone ID: 700908767H1
caccactaccgacattttatagagtttgtaagaagaaatcaaccgaagggttccaatcaattccatatgtggctgcactcttcagtgcaatgctttggatcttttatgcctatgtgaagaccggagaaatgcttcttatcaccatcaatgcattcggttgcgtgattgagaccatttaccttgccgtatttatcacttactgccccaagaaagctaggatgtcgacattgaggatgattgttttgttaaa

SEQ ID NO: 87842 - DNA, 247 bp, Glycine max
  Clone ID: 700908769H1
cgataaggagccgtcgtcggaactcggaagtgggtttgcgtcgttgtgaggtttaacgagacgatgagggcgctgtttctgttcttcgttctcttctctttcagctatgccaccgaacaaatctttcctgctcatatcggtagcatttttcgtggtggcggtggtggccgctctcgcgaacccaaatacaagatcgaatttcatcccgaagattccccttttcaccctgatgatgatcaggaatcta

SEQ ID NO: 87843 - DNA, 245 bp, Glycine max
  Clone ID: 700908771H1
ttttgaaatttgcacgagctcaggttcaaaaacgggctcctaatctccaacatcctttggtttgcattgatgttattgaagcaggagtagttgctggtccccgtgcaggactctggaaggaagttgaagcatctgaaggacttataaagtcagatactagcaaaagcttaattcacgtatttttttctcagagaggaacatccaaggtacctggggttacagattgtggtttggttccaagacac

SEQ ID NO: 87844 - DNA, 144 bp, Glycine max
  Clone ID: 700908772H1
ctggtgcagcttgtcgttgatactttgccatttgggggagttggggagagtggaatgggatttcaccttgaggaaacgaagcttattctacaaatgaactatttcaaccgagaatattattatttgtggtattataattacgtt

SEQ ID NO: 87845 - DNA, 241 bp, Glycine max
  Clone ID: 700908773H1
tcgtatttcacttcctcacacaatccacaccaataacaaaaccctccccaaaactaaaaacgtcgaaatcaaaattcacattactacaaaatttgtctgttattctttctctccaccaccatggctactaccatagcagagcaagaagcctcatcacgtgccccgcactgctcgactacgccaccactacatccgacgacgacacggaataggaggaggaggagctggtacacgagcaaaa

SEQ ID NO: 87846 - DNA, 238 bp, Glycine max
  Clone ID: 700908774H1
gatggccagcatcttctcgaagacgagcttcaacttctctgcgaatatgtaaaagagatccttattgaggagtccaatgtgcagcctgtcaatagtccagtgactgtttgtggtgatattcatggtcaattccatgatctaatgaaacttttccagactgggggtcatgtgcctgaaacaaattatatttttatgggagactttgttgatcgaggttacaatagtcttgaagttttca

SEQ ID NO: 87847 - DNA, 245 bp, Glycine max
  Clone ID: 700908777H1
caccaacaacaacacaccatgttcacagttctgcttctcttctcactccttcttaccacctctacttcccacaacataatatcataccctcatttccaacaactcaatgtcaaacaaatcctcacagaaaccaaactcaacccaacaaatacctacaaacacctccaacaccaaaaactcaacattgccaccgaagcatcttcaccggcaaaatataaacttaccaggtccagacatagtaagga

SEQ ID NO: 87848 - DNA, 244 bp, Glycine max
  Clone ID: 700908778H1
ctttccttttccttcttgttgctggagattacccttgatctcgaaaccaagggagaagcactatcaggtattcaagttgaggcttaaaaaaaaaaggcgtgtgcatgtaaatgattaaccagatagttccatttgagagttaaagcttccatttcattgcaaggcttgatttgcttgtcgtgaattggataactccaatcaaaacaccgccacctctgtcttcgcgttcaccactgtgcagtaa

SEQ ID NO: 87849 - DNA, 246 bp, Glycine max
  Clone ID: 700908779H1
taagcactcggttgcagaacagaacaaacttctttcactctttcgcttctgaatcttcaacaatggtgctcgaggcgacgatgatctgtatcgacaattctgaatggatgcgtaacggagattactctccttctcgatttcaagctcaagcagacgctgtcaatctcatatgcggtgctaaaacgcagtctaatccggaaaatacagtgggagttctcacaatggctgggaaaggcgttcgtgttt

SEQ ID NO: 87850 - DNA, 251 bp, Glycine max
  Clone ID: 700908780H1
gccacctgaatgctttgtaaaggatgtgacaaaatgtgccaaagcctccacacaacatacgacatagtgctatggtgcactttacactctagcagtgggaactggaggaagcaagcccaacatctccaccaattgaagaaggttagcttgtgtaacttctctttagggtgaaaatcatcaaattgatcagctcctatggtggcgttcctatcatcacttctcaaatctcgaaccctctcgttcgtgccgat

SEQ ID NO: 87851 - DNA, 251 bp, Glycine max
  Clone ID: 700908781H1
ggctcagacgaccagaaactgtgccacgaggttctgtcatcttcgaacagcacagacccaaaggagtacatcgcaaccgtggtgagaacctcgatggacagcgtgatcaaagcgttcaacatgagcgacaggctgacggtggaacacggctacagcagcgccggaatgaagatggctctggaggattgtaaggacttgttgcagtccgccatccacgacctagaggcctcaggcgtgttggtcaaagagag

SEQ ID NO: 87852 - DNA, 247 bp, Glycine max
  Clone ID: 700908783H1
gtggtgccttatcgctgtggttatcatcttcttcttcctctttcttagatctcttctttctctacgccgcacgccgaaaccatggccggaaaaggagagggtcctgctatcggaatcgatctcggaaccacctactcttgcgtcggtgtgtggcaacatgaccgcgttgaaatcatcgccaacgaccaagggaacagaaccacgccgtcttacgtcggattcactgacaccgagcgtctcatcggtg

SEQ ID NO: 87853 - DNA, 250 bp, Glycine max
  Clone ID: 700908784H1
caggatagaaaatttcaatggagagtggtgaagactattccctgtttgagactaggaaagacaaaggaaggcacattcgaaggatctatgcaatctctttgtttgttcgccatatgcttcatctgggcttacagattgagccacatacccgcatatggcaaatgggcttggcttggtttgtttgctgcagaactctggtccggtttctattggctctttggtcaagccctccgctggaacatgctgttca

SEQ ID NO: 87854 - DNA, 246 bp, Glycine max
  Clone ID: 700908785H1
ccagcagcttggttccaacgcaggaacctcaagctgcggttattcaagcggaaaatcgaatctttgggaggaagaaggaggcatggacgagcttcttgcagtggtgggttacaaggtgaggtcatcggacatggcggaagtggcgcagttcctggagcgtcttgaggaagccatgggaaatgtccaagatgacctcacggacctttcaaacgacgccgttcattacaacccttccgacatctccaa

SEQ ID NO: 87855 - DNA, 245 bp, Glycine max
  Clone ID: 700908786H1
cccaaatggaacatctctatagagagaaactaagggttggattttttcggttcagttgccaccacagcctctgactgtctagagggacattggctccccacggatgtgcccagagcaagattgttgcacctactgtaagcacaaatcaaatgccatccctaaaaatgaagagcaaagtaagcgtgactgtttaacagaaacaaaggatcttcatgtgtgtccgaaatcaaaaataatttccaaaa

SEQ ID NO: 87856 - DNA, 241 bp, Glycine max
  Clone ID: 700908787H1
ggaagatagaaaaaaacaaaaacaccttattgacaccaccttttctatcatccttcaagtcatcatctttgatgatgcccatcctcctggtcattctcttggccttgttttctccttcattaggctttcctttagcatctttccaaccaaaagacaatttcctcattgattgtggtgctgaaaacacagccactctccctgatggaagacatttcaaatcagaccctcaatccagatcctt

SEQ ID NO: 87857 - DNA, 240 bp, Glycine max
  Clone ID: 700908788H1
cttggcaagagagtcatttcactgctgagggcgatgtcgagttcaaggcagtcctgtttgtaccacctaaggcacctcaagatttatacgagagctattataacgcaaacaaatccaacctgaagttgtatgttagacgtgtgttcatttcagatgaatttaatgaactgttgcctaagtacctaaactttttgctgggtcttgttgattctgacacattgccacttaatgtatcgcgag

SEQ ID NO: 87858 - DNA, 244 bp, Glycine max
  Clone ID: 700908789H1
ctcctgaatatgatgcgttagctaagaaccctgagaaggagtacttgaagactattactggcaagaaagagaccctcattgaccttacaattatagaaattttatcaaggcacgcatctgatgagttctaccttgggcagagagatggcggtgactactggacttctgatgccgggccattagaggcctttaagaggtttggaaagaatcttgacgagattgagaagaagcttataggagaaga

SEQ ID NO: 87859 - DNA, 241 bp, Glycine max
  Clone ID: 700908790H1
tcctaacctaaaccctactcattctccatacctcaacgaagctgttaaagagacggcaacactttgctgtccgccttgaccgagcagagcttcgtcttggccctcgattttgccctaaagtactctcagtcacaacagacaccgtcgtcgtcgtcgtcgtcatcaatggcaccgaagcagaccaaggctgagaagaagatcgcttacgatgcgaactgtgcgacctaatggaggagtacgg

SEQ ID NO: 87860 - DNA, 242 bp, Glycine max
  Clone ID: 700908791H1
gtgaggagcaagatgatttatgcaagctccaaagacagattcaagagggagctggatggaattcaagtagagttgcaagcaactgatcctactgagatgggtcttgatgtgttcaaaagccgtgccaactaaaatgattatataaaatagtaggctttctggtgggagcagcacccctgaagccttagttactcatatggaaaatatcctagtttgtgggatggtcaacttgggtagttatg

SEQ ID NO: 87861 - DNA, 245 bp, Glycine max
  Clone ID: 700908793H1
cttttccgattccgtcgcgaatttccgattcatcgaagaagaagagaaaacctaaatcgcagatccgaacgcagtaaaaaaaccatggcggaagaacaccgatgcgaaactcccgaaggtcacctactctgcgccaacaactgcggcttcttcggtagcaccgccacgatgaacctctgctcgaaatgctacggcgcgatccgcttgaaggagcaagaagaagcgtcgacgaaatctacaatcga

SEQ ID NO: 87862 - DNA, 246 bp, Glycine max
  Clone ID: 700908794H1
cgaagagtataaaaaagaaattcttcgttacatgtactatcaccagaatgaagatggaggatggggactacacattgagggtcacagcgacatgttttgtactgcactaaactatatatgtatgcgagttcttggagaaggccctaatggaggtcatgacaatgcttgtgctagagcaagaaaatggattcatgatcatggtggtgtaacacacataccatcatggggaaaaacttggctttcgat

SEQ ID NO: 87863 - DNA, 250 bp, Glycine max
  Clone ID: 700908796H1
catgacttctctttacatctgatacagtctctttcttttctggcttttctcttgtttgataattgatatgccacttctaatctttggtagtattgtagttaaaaaccattggcaaggacataacatattaacattagagtgcaagaagtagggcttcaatctgaaggagaataagatcatgagaaagatattcagcagtgataacttcaaaggagaaaatcagaattcgtcagaggccaaaaaggaaagt

SEQ ID NO: 87864 - DNA, 262 bp, Glycine max
  Clone ID: 700908801H1
caaacactaacaacaatgctgataaaaaacaaaatgcggcctaggtcaagtacatattgcgtggggatgacaaccggacaacgctcatgataaaaaatattcccaataagtatacttcaaagatgcttcttgttgccatagatgagcaatgtcgaggaacttatgattttctgtatttgccaattgatttcaagaacaaatgtaatgttggctatgcattcatcaatatgattgatcctggacaaattattccattccacca

SEQ ID NO: 87865 - DNA, 258 bp, Glycine max
  Clone ID: 700908803H1
ctggaaccctctccttcttcctcctcgtttttcttcactcaaacatgcttttccaacaccattcggttcccgtagctcacaattcagtctcagaaaccgttcccattcataaggaaaaggaacaaaccctaccttctgtcaaacctacttactcccccatccctcccaatcgaggccttcgaacccctcacatcgggtaccatgttgatgggactactcgcaaattcttcgagggttggtacttcaaagtctccattc

SEQ ID NO: 87866 - DNA, 258 bp, Glycine max
  Clone ID: 700908804H1
ttcttgtcttctggtgcttatataatgacgtactagctagcctcatttttcttcatccttattatttctctctctttctttccctatattcattttctgtgctttgaaagatgactggggttcctcaagaagcacccgtttctcttgatcagctcaagcagacactggatgagtttgcaaaggagagggattgggagcagtatcatagcccaaggaacctccttttggctttggtgggtgaagtgggagaattgtctg

SEQ ID NO: 87867 - DNA, 246 bp, Glycine max
  Clone ID: 700908805H1
ctgatattttctcttccctataggcatagctggctgtgagcaattgtggtttcacagaacgtgctcttttcaactatggcggagaaacacaacatcaagaacccagccgtgaagcggattctccaggaggtcaaggagatgcaatcaaacccttccgatgactacatgagcttccctcttgaggttcttttctttggtttcgctttctctactattattcattcttcaatttcactaattgtgtag

SEQ ID NO: 87868 - DNA, 251 bp, Glycine max
  Clone ID: 700908806H1
ggttaatccatttaccaagtatgcattgcctatatctccagtggcaatgagtctggaagagttgataccgtcaaaccatgccaagtcttatctatattccatcttcatcagaacagggctggttctttctaccctatttattggtctctcagttctcctttttggtctggtgatgtcattgattggatcattactcacaatgcttgttactttgatactaccctgtgcttgtttcctaagaatctcggggc

SEQ ID NO: 87869 - DNA, 260 bp, Glycine max
  Clone ID: 700908808H1
gattgattcaatgagagcttcttccccaactcgtgccaaatcagaaagccaagaaaaaagatcttggattctttatcacccttcagctctgaacacgtttgagcaaatagtatgtagtgccaaaggaaagcaagtcgtagtttttcttgactacgatggaactctctccccaattgttgcagatccggataaagctttcatgactagaaagatgagagcaacgctaaagggcatagcaaggcattttcccacagcaatag

SEQ ID NO: 87870 - DNA, 261 bp, Glycine max
  Clone ID: 700908809H1
caaaacgtagcaagagcagttacaaacgttcagtgttgtattttcaattcagattcagaaggagacgatggaagaacccgtgaaggaacagcccctctctgctgggaactctgcgcgacccaagcttcagagatacgcgcttcgttcgtcctctaaatccaaggaaaacaagcaagacaccgcacccgatctctccatttcttctgaatctaagagggggttaagtactccacacgtaagcagaagtgtaggtggtcttga

SEQ ID NO: 87871 - DNA, 257 bp, Glycine max
  Clone ID: 700908810H1
gacacatcccatttcttctgcctgcgccatattacacaaaattttcttcgcggtaactcaaaagacaaacatttaaagaaaccactcttgctggctggtttcgcataaacggagaagatgcacttgtgacatcttggggtatccgtgccaataagccaagtgcagctaaatggcttgatcaactacccaaacaaaattgggtacaatgcttcgataagggaaaatgttaaggacatatgactacaaatttgtctgag

SEQ ID NO: 87872 - DNA, 259 bp, Glycine max
  Clone ID: 700908812H1
cactctctctgatgaacttcacattcacgcgccctcctcatgctgcacccttccctaacactcctcctcctcctcctcctctttcaccccaacgccggggaccctaacgacgccaaaatcctccggcaactccgcaacgggctggacaacccagaacaactgccatggccggacgagggcgacgacccatgtggttggaaatacattttctgcgacacaacaaacgcgtgaaccagattcaacccaagggcttaaacct

SEQ ID NO: 87873 - DNA, 267 bp, Glycine max
  Clone ID: 700908813H1
caggagcattttacatcaaaaattttatgcaatctgaatttttcctcgtgagtgtcactcttgaagacattccaaatcatggaaccattcactttgtttgcaactcatgggtttacaatgcaaaaagttacaaaatggatcgcattttctttgctaataagacatatcttccaaatgaaactccaactccactagtgaagtacagaaaagaagaattggaaaatctaagaggagatggaaaaggagagcgcaaggactatgatagga

SEQ ID NO: 87874 - DNA, 263 bp, Glycine max
  Clone ID: 700908814H1
cacttctacagattcttttcttttcttttctttctcttcttggtttggttgctggaatactatggaatctaatccaacaaccatggacgcaaaacgcgaactcgaagtgcaagactgggaactgctccacccaaacgacgacgattcaatcgtgttgcgtgggcccccactcgactctatcctccccgatcacttctcccttaatcccaattccagttgcagttccaattccaattccaattcctcctccgaggtcgatcgca

SEQ ID NO: 87875 - DNA, 266 bp, Glycine max
  Clone ID: 700908815H1
cgctctctctctccttctcgctctttcagctttgacttttgttggaaactaaggcctaatcaaaatggtgaagttcacagctgaagagctacgtcgtattatggactataagcataatatccgtaatatgtctgtcattgctcatgttgatcacggaaaatcaaccctcactgattctcttgtggctgctgctggtattattgctcaagaagttgccggtgatgtccgtatgactgatacccgtgcagatgaagctgagcgtggta

SEQ ID NO: 87876 - DNA, 259 bp, Glycine max
  Clone ID: 700908817H1
gttcattctctttgcgcagttccctacctctcctttcaagatgcagatcttcgtcaagaccctcaccggaaagaccatcacccttgaggtggaaagctctgacaccatcgacaacgtcaaggccaagatccaggacaaggaaggaattcccccggatcagcaacgtctcatcttcgccggaaagcagctcgaggacggccgtaccctcgccgactacaacatccagaaggagtcaacccttcaccttgtccttcgtctc

SEQ ID NO: 87877 - DNA, 261 bp, Glycine max
  Clone ID: 700908818H1
cagcgactgagtcgcggtctcttcccaactcggaactcagtccattccgcatttatcttcaaaccaaatttcttctgaagaaggagatttgaattcagaattgagtgagaagaagagaatagaaatgggctccgaattgattttcagaggccacgaggctcagcccgtggacgactcgtactcgccgaagccccacaagccctggttcaccgtgactcgcccgattcactacatgctccgcgagcagcgactcgtcttcgt

SEQ ID NO: 87878 - DNA, 245 bp, Glycine max
  Clone ID: 700908819H1
ggaaaaggcgtcttcataaacgccgcccaagacttctcatacccttttattcattccattcgtttctagggttcttcttttctttgccgagaaaatgagagagtgcatttcgatccacattggccaggccgttatccaggttggacacgcctgctgggaactctattgccttgaacacggcattcagcccgatggacagatgccgagtgacaagaccgttggcggaggagacgacgtctcaacac

SEQ ID NO: 87879 - DNA, 192 bp, Glycine max
  Clone ID: 700908820H1
aagtatagttcgatagtgtttgaatagttggcagtgattttgtgtttagaataccttcccggtccttctatattttagaagcctaagattaccaatccgaattgatctgtattaccagaaggtttaatgttgtatcttgtatgcttaattattttatcccaattttttaaaagaattttgagtttttcgacc

SEQ ID NO: 87880 - DNA, 259 bp, Glycine max
  Clone ID: 700908821H1
ctcagtgaaagagaatccgaggcgaagagaagagaaaaattaagatggaggggaaggagcaggaagtgtcgctgggagcgaacaagttcccggagagacagccgattgggacggcggcgcagagccaagacgacggcaaggactaccaggagccggcgccggcgccactggttgacccgacggagtttacgtcatggtccttttacagagcagggatagcagagtttgtggccacttttctgtttctatacatcactgt

SEQ ID NO: 87881 - DNA, 258 bp, Glycine max
  Clone ID: 700908822H1
ggtttttgaagactgctgcctatggacactttggaagagaagaccctgacttcacatgggaagtggtcaaacccctcaagtgggagaaggcctaagtaattcattccactgctctatgctggaagttttttgagcgttgcccttataatatgtctaatatccataactttccacgtctcttactctgtgtgtttctctcctcttcctcctattttgttatttgtatgttcttttgtaattttttacgtgatcaactaa

SEQ ID NO: 87882 - DNA, 257 bp, Glycine max
  Clone ID: 700908823H1
gtctgccttatctgctgttctagtttattggcattgggatcagtaactgcaattcccaatgcaaattttcatcgggcgccaaggagcactagtgtgcttctggttgttgtctgtgttttttgtggtaacaggattcaacaatgaagagcacaggacagtggaggtagttggcctaggagaatgcgcagactgcaggcagaacaatattaagaataaccacgctttctcagggttacgtgtgacggtagattgcaagt

SEQ ID NO: 87883 - DNA, 258 bp, Glycine max
  Clone ID: 700908827H1
ggattagagggtcgccacgtttagcaataaccaaaccctctctatccttttttcttctccttctcttcgctagggttttagcttcttcctcttcacttcgttctttttcgtctctacaatgagcaacgacaaggacacattcaacgtcgccgatctcacttctgctctcaacgaggacaatagagcagaccttgtcaatgctctaagagcaagatacagagtttggctggacaacactcggatattctagagtctctg

SEQ ID NO: 87884 - DNA, 162 bp, Glycine max
  Clone ID: 700908828H1
aaaacaaaaacctagagggcagtagctggttctgccggagagaaacccattccacttggtgagaacgttctgcagaagcatgctgcattctttgacttgaataaagatggtgtcatctacccatgggagacttataaagggttgcgtgaaatcgggactggg

SEQ ID NO: 87885 - DNA, 261 bp, Glycine max
  Clone ID: 700908830H1
gcagcttgtcgcgtgcgtgcctctccggcgaggccgtaacaatccacaaacaacaagcttccaaatttctccttcgtttcgcttccaatggcatcaaatagccattcaccatctctcgagatattagttcgaggaccagaggatttctcgctctcgacaggaccccccttcgcgaacgatcaaccaagcgtcaagctcgagaaagtgagatgcatcaatgcgatattcagctacgacggatccaatctcatggtgacgaaa

SEQ ID NO: 87886 - DNA, 266 bp, Glycine max
  Clone ID: 700908831H1
agctcttcagttttcacgtcttacattgttttgagtctagtgatggcactagcaattagcggtttcaatttcaaaggggcagaggcagcacgtgccttctttgtgtttggtgattctctcgttgacaatggcaacaacaactacttagccaccacagctagagcagacgctccaccttatggcattgattatccaactcgcagacccactggccgtttctctaatggcctcaatattcctgattttatcagtcaagaacttgggtc

SEQ ID NO: 87887 - DNA, 212 bp, Glycine max
  Clone ID: 700908834H1
gcattgccaatggatgggcctcaagtgtctggtgtccacgtacaatggagtcaggaggcgcatctcgtggcccattagcagagacgaggtttggatcagtaatgtgctccatacgcgtctagtcgaggatagaggaggtcgtgattggctgtcagtgaagagggctgaatttggatttcctggtggaggtactcaatgtatacatggtgcag

SEQ ID NO: 87888 - DNA, 258 bp, Glycine max
  Clone ID: 700908836H1
cactgcattccctttactctctctgtcttttcttcaacctctctcggtttcgaagaatcgcaatgacgaactccatgggtcccccaccccccaaaaaccctaatccacctgacaccgcgccaccgtcaatgcctcctcctcctcctcgtgactcagcggccccgtcaccgccgccgccaccgccaccagctcgcgattcgagcaatgctccctctcagggtgtggcagttccgtataagatacctccgtggggcgccg

SEQ ID NO: 87889 - DNA, 169 bp, Glycine max
  Clone ID: 700908837H1
tagttatgttccgtaacttatgggctcttaattaaactatatctgcacaaaattatatatatatcaaatgtgatggtatgtggactataaaaagatatggttgagaaccacaaactttgaaacttcgaataatatattgccagtgacagtcttgttgatttgttatagc

SEQ ID NO: 87890 - DNA, 254 bp, Glycine max
  Clone ID: 700908839H1
caaaagacaaaaaaataaccaccaaataaacatctttctccacaaacctagcgggtctccacttatccaaaaaaagaattcactatccatcatggacattaggaaggttacctgtgccgttctcattgccgctgcctccatgagtgcagcattggctaccacagaggtctctgcacccgcccctggccctagcagcggtgcctccgccgccactgttggctccttggttggtgcctcagtcttgtccttctttg

SEQ ID NO: 87891 - DNA, 255 bp, Glycine max
  Clone ID: 700908844H1
cactgcattccctttactctctctgtcttttcttcaacctctctcggtttcgaagaatcgcaatgacgaactccatgggtcccccaccccccaaaaaccctaatccacctgacaccgcgccaccgtcaatgcctcctcctcctcctcgtgactcagcggaaccgtcaccgccgccgccaccgccaccagctcgcgattcgagcaatgctccctctcagggtgtggcagttccgtataagattcctccgtggggcg

SEQ ID NO: 87892 - DNA, 169 bp, Glycine max
  Clone ID: 700908845H1
tagttatgttccgtaacttatgggctcttaattaaactatatctgcacaaaattatatatatatcaaatgtgatggtatgtggaatataaaaagatatggttgagaaccacaaactttgaaacttcgaataatatattgccagtgacagtcttgttgatttgttatagc

SEQ ID NO: 87893 - DNA, 267 bp, Glycine max
  Clone ID: 700908848H1
aagaagttcaaccttccaatcctcccaaccaccacaattggatccttccctcagactgttgaactgaggagggtgcgtcgtgaatacaaggctaacaagatctcagaggaggagtatgttagttcaattaaagaggaaatccgcaaagttgttgaactccaagagaatcttcatatcgatgtcctggtacacggtgagcctgagaggaatgacatggtggagtactttggtgagcagttgtcaggctttgcctttaccgttaatggc

SEQ ID NO: 87894 - DNA, 259 bp, Glycine max
  Clone ID: 700908849H1
gatcctctatacctctctctcccgtaagtggaggttcagccgttggatcatacaaaatggctctgataatctaaatgaattaaagtttcggtgtctcgcacgcacgcacgcttcatggatgacatgaacgagttgaggaagaagagaaaaaccgcagacgccgagtgagagccgaaacttctctcatggaatcgcaaacggatctgctgaaccgacccggaatcttcttaattggatcctctaacgtcggcaaacgcac

SEQ ID NO: 87895 - DNA, 256 bp, Glycine max
  Clone ID: 700908850H1
gacttacgattggctgatgctcttttctgtaattacccttgggtatgttggctggatgatctatcttggtcttcatgttctgcagtcttatacctcactgtcaggagatgcttttggaatggagcaagcagttcagaaaaataaccgtggacaaatatatctatatggatctatggtgacgggaatgctttgtttgcttatgctgctggagcagtctcctcctctttaccatgcatacatcatcgtgacttcattt

SEQ ID NO: 87896 - DNA, 227 bp, Glycine max
  Clone ID: 700908851H1
ttctattccatcatcaatggagaacaccgagggatccggatctgcgacgaacggggtgctggctccgccgcgcaaggtggcattgataaccggaattaccggacaagacggttcgtacctgacggaattcctcctggacaaggggtacgaggtgcacggcctgatccgccgctcgtcgaacttcaacacgcagcgcatcgttcacatatacgtggatccacacaaca

SEQ ID NO: 87897 - DNA, 258 bp, Glycine max
  Clone ID: 700908852H1
tgtgattatccaattaaagcagttcacaaggctgcaatgcttgcatatcattgcttgaaccgcaacccgaaagcaaggcctctaatgcgagatattgtggattcattggagcctttgcaggcacacacagaggtccctattggaaaaacattgaccataatcagtgaggttcctgaatctggtttgaaaatgaaagatgatgcaatatgacttaaatgagggtggtgttgtaggcttatcagtttcacttcttgttag

SEQ ID NO: 87898 - DNA, 258 bp, Glycine max
  Clone ID: 700908856H1
gccttattgtcatgtgtaaaggattctgatttcaagacaacaatctatcctttgaggttaagttcaatgactttgaatacaagctctatgtctatggcggaggagaatccaacatccaaagaaccaccatctgctcaaggtcatggtgcagaactgcagcttagtgatggcagtagcatatatgcaaagttggtggttggcgctgatggaggaaaatcacatgttagggagttagcaggaatcaaaacaactggatgg

SEQ ID NO: 87899 - DNA, 257 bp, Glycine max
  Clone ID: 700908857H1
gaaatttgtttctctctaaagagtctccgctgaactttttggtttcttgaagatgtcgttactctccgatcttatcaaccttaacctctccgacatcaccgataaggtgatcgccgagtacatatgggttggtggatctggcatggatatgaggagcaaagcaaggactctctcgggactggttaatgacccttccaagcttcccaagtggaactatgatggttccagcactggtcaagctcctggacaagatagtg

SEQ ID NO: 87900 - DNA, 256 bp, Glycine max
  Clone ID: 700908858H1
gtctcgctctctcattcatgtcccaactgtacgacggaggacaggttgcgtaactgccaccaacccttcgccgcacggtgggcgtggtgctttgccttctgaaggtggtagcccttcagacttgctcttcttagctggtggtggttctgctgtcttctagcttcttcttaactcttttttctttttactacttttaagctaccttgttctcaaaataacaaaaacaaacactttcttacttcataagatcaccttt

SEQ ID NO: 87901 - DNA, 257 bp, Glycine max
  Clone ID: 700908859H1
aaagagttcattcagaaaccccgacgaactaaattttcagattttgtttccgatctctgaagaagagagtgatggcggaaccttggagaaacatcgacgtggagaagctgatctcgtacagcgacgacctcgtcaaggtgttgtcggagggtccgcgcgacctcaacaacctctctgcatctctccaacaaacacgcgctccctcttcctcctgcgactccgacctcaatgaagctcgctccttcctccatgactat

SEQ ID NO: 87902 - DNA, 261 bp, Glycine max
  Clone ID: 700908862H1
ggaatgtatgattccctgaagccagtagttttggttggtgggttgcaggatagtttctttgctagtttccttttgggatggggaatcacaattggtgctggtttggcttcttaccccattgacactgttcgtagaaggatgatgatgacttctggagaggctgtgaagtacaagagctctttgcatgcattccaaacaatcgtcgcaaatgagggtgccaagtcactcttcaaaggtgctggtgcaaacatattgcgtgct

SEQ ID NO: 87903 - DNA, 262 bp, Glycine max
  Clone ID: 700908863H1
gtgaatgcgtatccgtttttcgcttacgctgcaaactctgataaaatctctttagactacgcgctattcaaggaaaaccccggcgtggttgattccggtaatggtttaaaatacacgaacttattcgacgctcaaatcgacgccgttttcgctgccatgtcagcactcaaatacgacgacgttaagatcgcggtttcggaaacgggttggccttctgctggggactctaacgagattggagccagccccgacaatgcggcgt

SEQ ID NO: 87904 - DNA, 255 bp, Glycine max
  Clone ID: 700908865H1
ctacctctcccttcaagatgcagatcttcgtcaagaccctcaccggcaagaccatcacccttgaggtggaaagctctgacaccatcgacaacgtcaaggccaagatccaggacaaggaaggaatccccccggaccagcaacgtctcattttcgccggaaagcaacttgaggacggccgtacccttgctgactacaacattcagaaggagagtactcttcacctcgtcctccgtctccgtggtggcatgcagatct

SEQ ID NO: 87905 - DNA, 255 bp, Glycine max
  Clone ID: 700908866H1
cacacactagctctcttgttttctttcttcttcaacataacatgcagtctccaattgcctcatgaatcatcattagtcagggtttatcctctaagaaaataaacatactatagcaatgagtgcgtccaggttcatcaagtgtgtcactgtgggtgacggtgccgttggcaagacttgcatgctcatctcctacaccagcaacacttttcctacggactacgtgccaactgtctttgacaatttcagtgcagatgt

SEQ ID NO: 87906 - DNA, 255 bp, Glycine max
  Clone ID: 700908869H1
catggaagcaatatatatggagtgctatagagatagagagagagagagaaagaaaagagtgtatgtatttatgcgtttgtgtgagagatagagagatagagagagagaaagagttgttgataaaaacataattattttttcttcttggtctttggagggtcatgtagatgtagtagctatagatttttggtttatttgttgataccctttttcttctttatcttatttttgttttgaaatctgaaacctttcaaa

SEQ ID NO: 87907 - DNA, 251 bp, Glycine max
  Clone ID: 700908870H1
gtgaaagtgagaaaaaataaaaatcaaagagcataatgtcagggatcattcacaagattggggagacccttcatgtgggagggcacaagaaggaggaggagcataagggtgagcaccatgctggagaatacaaaggggagcaccatggtgaacccagtagtgagtacaaaggagagcatcatggtgaacacaaagctggagagtaccatggtgagcacaagccagagcacaaagaggggttcctagacaaa

SEQ ID NO: 87908 - DNA, 252 bp, Glycine max
  Clone ID: 700908873H1
agttagggtttttaggtatcagagagaacggtgtatatagaaaccctatgtattcctccgatgcaccaggggaattgaatatatatagtaagaaaaaggcaaaaaaaagaggtgaaaaaaatttgtctggtagattgttaattctgttgttttgcgtgtatctggactcaggtaatttctaaagcttatctcggttttccatgcgctattcgattgaggattttaatatctgccagggtttaggactttttt

SEQ ID NO: 87909 - DNA, 255 bp, Glycine max
  Clone ID: 700908874H1
ctggtgaatgcgtagaaaaggaaaataaagaaattagcgtgaaaaatgttgggtgtgttcagcagctccatagtgtcgccgccggaggagctcgttgccgccggcagccgtacaccgtcgccgaagatgacggcggcggcgctgcggaagtggttcgaggagaagaacccctccgcagtgtcggtggaggtcggagagcatgtccagcacgcttatacccaccagaacgagtcgccgtttcagcccagatccttt

SEQ ID NO: 87910 - DNA, 256 bp, Glycine max
  Clone ID: 700908876H1
cttatagcttcatcccaaaaagctcttttccttctaaatttgattccttagttcagcattctattattatatatggcttcttcaccttcctcagaaaacaaaaacctagagggagtagctggtggtgccggagagaaacccattccacttggtgagaacgttctgcagaagcatgctgcattctttgacttgaataaagatggtgtcatctacccatgggagacttttaaagggttgcgtgaaatcgggactgggg

SEQ ID NO: 87911 - DNA, 257 bp, Glycine max
  Clone ID: 700908877H1
gttctgaacgacttttcaagagaatcaaaccatggcagtgaaagtatacggtccccactgtgcttccaccaagcgtgtgctgtcttgtctggttgagaaggaagtcgaatttgaggttgtccctgatgatgtcactaagggggagcagaaggatcctgagtacctcaaactacagccatttggagttgttcctgtcatcatagatggagattataccttatatgaatctcgtgctataatgaggtattatgcagaaa

SEQ ID NO: 87912 - DNA, 259 bp, Glycine max
  Clone ID: 700908878H1
gataattgtaaaaaattggatttgggcgtattgttttgttattagttatggttcaacttcaatgacatagtaaattgtctgtttttgttagatgggattccaatttgctggcaaagctgtttactctgcggtatggatagctgccttttcactcactatggaattgctgggcttctctacccagaaatgggttactgcaggaggtcttgggacagttttgttgacccttgctggtcgtgagatatttacaaacttcctt

SEQ ID NO: 87913 - DNA, 259 bp, Glycine max
  Clone ID: 700908879H1
atcacttgtggatgcacacaagccattgatgtttcagtggtgatgcttgctcgccccggtgcaaacatcattcttccaagaccaggtttcccactctatgaacttagcgcttcatttagaggagttgaagtgaggcattatgatctgcttccagagaaaggttgggaggttgatctagatgctgttgaagctcttgctgatcagaacactgttgctttggtgattataaatcctgggaatccttgtgggaatgtgtaca

SEQ ID NO: 87914 - DNA, 256 bp, Glycine max
  Clone ID: 700908881H1
gcgttgtgtctaacagtctaagtctaacgttgtggagcatagaagagaaagagatgatattgaactgtgtcagagtgacagctatgcctatgatggctgttcctaggtggagatccacctgctgctgcgcttcttcttcgtcttcagtttcaaccatcaacacagaccaacttcgttctcaacttgatcaacttcatgcagaagctgatgccaccagaaccaaggcaactaatgctagattgaggcttctgcgact

SEQ ID NO: 87915 - DNA, 254 bp, Glycine max
  Clone ID: 700908883H1
ttctctagtctctgtcctaccacaaaaatggtcccaaaaccaatcttagtcacaacaccaccgccggcaacttctgcaccctctccactgctcaacgcagtttcacccctcaaaacagaagaaaaaccccaaacacaaaccctaaaaacccccaccaccaccactcaaaaagctataaccagaccaagcccatcatcatccaccaccaaaacgacgccgcagcagcgcgtggatctaaagagaacaacaaactc

SEQ ID NO: 87916 - DNA, 254 bp, Glycine max
  Clone ID: 700908884H1
caagaagcacaatttctctttctctctttttttgtgtgtccaaaatggctcctagttctgctcacaacaatgggttctatgtgcttatgctagttgggatagtggttagcactatggttgctacctgtgctggtagcttctaccaagactttgatctaacatggggtggtgaccgtgctaagatattcaatggtggccagcttctatcactttccctagacaaagtctctggctctggcttcaaatcaaagaaa

SEQ ID NO: 87917 - DNA, 255 bp, Glycine max
  Clone ID: 700908885H1
aatcttcatattcatcaaactcatcaaaatgaatctgtaccactcctccaccaccaccaccaccaccaccatcttcaccgtcatattcctcctccttgcaatattattcactctcacaccccacaaggccaacggtgccacgtgtcaccctgagcaagaagcgggcctgttgggcttcaaatccggtatccgatccgacccgtccggcctgctcagtaactggatatcgggtacggactgctgcacatggaccgg

SEQ ID NO: 87918 - DNA, 252 bp, Glycine max
  Clone ID: 700908886H1
gctccctgacctctcttcctctgctgaaaatggtgtcaccactcacttccaatcccccgaaagcgtcacaaattcatggatgaagaagaggttctatgtggaaaccttggtgagtgttctgcctcctgagaaggattctgtcccatgcaacttcctccttcgccttctcagaaccgccaacatggttcgtattgacgccatttatagaggtgagcttgagaaccggatttcgtggcagctagaccaagcttc

SEQ ID NO: 87919 - DNA, 249 bp, Glycine max
  Clone ID: 700908887H1
tctggctctctaagaaacatggctgaagagggtcaggttgtcggcgtccacaccgttgatgcgttgaaccagcaactgcagaatggaaaagactcccaaaaattgattgtggtggattttactgcttcctggtgtggtccatgccgttttattgccccagttctggcagagattgctaggcatactcctcaagtgatcttcctcaaggtggatgtggatgaagtgaggcctgttgctgaggaatattcc

SEQ ID NO: 87920 - DNA, 257 bp, Glycine max
  Clone ID: 700908889H1
cttccccttcttcgctccccccccgctcgttgacctccgattctcccctcatcggagctcaaatctccgatccctcccttcatatcgcttcacggcaaccttctcttcacccatcgcaagatctagttgaatctcgaccggttcgaagctctactcactcaaatcctcttcagatctggggggtttgattgcaattctcactctgctgctcggatttgttcgttttgaaatgtcgattttaccgaaaggcgattcgg

SEQ ID NO: 87921 - DNA, 254 bp, Glycine max
  Clone ID: 700908890H1
cccaccatggcagcaagagcaacagcaatctttaacactccctcctcctcctccttcttcacattcacactctttctctctctctctctcctcctccaactttctctctcctccccctctccctccatccacgaccttctccgctccaaaggcttgccccccggcctcctcccagaggaggtgaaatcctacagcttctccgaaaccggccacttggaagtcttccttgacgcgccgtgcctgaccaaatacga

SEQ ID NO: 87922 - DNA, 252 bp, Glycine max
  Clone ID: 700908891H1
ctctcttgaacattcatggatccagtgagcgtgtggggtaacacgcccttggcgacggtggatcccgagatccatgacctcatcgagaaggagaagcaccgccaatgccgcggcatcgagctcatcgcctccgagaacttcacctccttcgcagtcatcgaggccctcggcagcggcctcaccaacaaatactccgaggccatgcccggcaaccgctactacggcggcaacgaattcatcgaccagatcgaa

SEQ ID NO: 87923 - DNA, 153 bp, Glycine max
  Clone ID: 700908892H1
ctcgcttccctctctctgcgttcggcaccagcgaaacgctcttcgttatctttttctcgactccgcggcgtagatccgaggagttcgggaaaccctaactcatcttccacacaacatacgatcccggtctattccctatccatcatctcaact

SEQ ID NO: 87924 - DNA, 261 bp, Glycine max
  Clone ID: 700908894H1
cacaatgtagtagtgaaggtattgagaagcttggaggtgaaagttttggtgaacttcctactggggctgggaactctgaaacaagctttcctgtaatagatattcctgcttcttcttgggccaccagtggcacaattgaagatctccacctagaaccacctttacatctgtccctttttccggagtattttagtccagagcggccgataaggacattaacccgctatgaggacatctactccatactccttgaacactctc

SEQ ID NO: 87925 - DNA, 263 bp, Glycine max
  Clone ID: 700908895H1
aaagtgaacataaccttggtaaagctgttgaaaatgttaaccaagaaattacctcacctagctcagtgatgaacatccatgcaatggaagatttcagaagtagaggagctgaaacattgaagtttctcagtaatttggatcagatcaaattgcctggacttcacccatcaatgtccatggacgatttggtaagccacattggacattgcatttcagaacagatgggatccgacaatccgagtttggctggtgacaccagtata

SEQ ID NO: 87926 - DNA, 267 bp, Glycine max
  Clone ID: 700908896H1
ttctgcttcagcagagtcaggttcaggaatactgcagacacctaactatgttgcccagcagtggcaaactgataggttaggcgctggtttaagttccttggatcaagatcgtcctgataaacttgcagcttcagcacagtcactatcaattcccctagtagctcagcagtttcttccaagttctgcttctcctggtgcctttcctgggtccatggctatatcatcttctgttcaaccagctaaccaagctcctggtgctcatttatt

SEQ ID NO: 87927 - DNA, 289 bp, Glycine max
  unsure (1)..(289): unsure at all n locations
  Clone ID: 700908902H1
tcgcacgcacgctttcgtgatctcggtcttcggtaccccttgttcttctcccaccaactttaccgtgggcnncctcgatcatgtctcacttcaanggcaagtaccatcatgagcttattgccaatgctgcttacattggcactcctggaaagggtattctggctgctgatgagtcaacagggacaattggcaagcgtttggccagcatcagtgtagagaatgttgaatccaacaggcgtgctcttagggagctgcttttcaccgctcccggtgctcttaaatatctcag

SEQ ID NO: 87928 - DNA, 262 bp, Glycine max
  Clone ID: 700908903H1
agaaaatctctggcttatggtggtttgtcgcgtggccttcatgaaggtgcaaaagtgattgagaagcatgctgcacaactctgtgttcttgcagaagactgtgaccagcctgactatgttaaactggttaaggccctttgtgcagagcacaatgttagcctgctgacagttccgagtgcaaagacccttggagaatgggctggtttgtgcaagattgattccgaaggaaaagcaaggaaggttactggttgctcctgtgtgg

SEQ ID NO: 87929 - DNA, 212 bp, Glycine max
  Clone ID: 700908908H1
agttcattcgcaagacacagtattttgagtagctttattactttatggttgggatattatgtactggcgaattttaatgagccaccggtttccaaaatgtactgcgaaatttttttatggttggtacatttcttaaataatgtgccgaactactgatacaaacaaacttttgaactcttaccaaaatgaattgatgtttcacgatattgatt

SEQ ID NO: 87930 - DNA, 260 bp, Glycine max
  Clone ID: 700908909H1
gataacatcacacagcattagtatgtatcagcaacaagggtcagatccaacaaagcaatcaccggcaaccggttttccggtgagctatagcaattcaacaacgtattcgaccaacgaggcttcctacgctccagtcccacctccccagcccaaacctcttgtcgattggtccaccggcctctgtgactgcttctccgaatgtggaaactgttgcatgacgtgttggtgtccatgtgttacctttggccgagttgcagaaa

SEQ ID NO: 87931 - DNA, 214 bp, Glycine max
  Clone ID: 700908910H1
ctctagcattattccataattgaatcaatttcatactggatccaagctaaaggaatgttatggtaaaacttcgtttgaaacgatagtggtaaaaatcaacgttcgactttaaagacatgattagattagctgtggattcttacatccgccattttttctagtatatagagatgaacatgctcttgactcgacatcgtttgttctgttccacaca

SEQ ID NO: 87932 - DNA, 256 bp, Glycine max
  Clone ID: 700908911H1
agaaaatctctggcttatggtggtttgtcgcgtggccttcatgaaggtgcaaaagtgattgagaagcatgctgcacaactctgtgttcttgcagaagactgtgaccagcctgactatgttaaactggttaaggccctttgtgcagagcacaatgttagcctgctgacagttccgagtgcaaagacccttggagaatgggctggtttgtgcaagattgattccgaaggaaaagcaaggaaggttactggttgctcct

SEQ ID NO: 87933 - DNA, 70 bp, Glycine max
  Clone ID: 700908913H1
cttcaatacccaaaacatcttgttttgtgtctttcgttcttttactctcaacaatggatttccacacaac

SEQ ID NO: 87934 - DNA, 255 bp, Glycine max
  Clone ID: 700908914H1
ggatttttgttattattttgtggcagcagtgacagagtgattggtgtgagtgcggcaattactggaacagcggttgagtgtgcgatcgagaaagcagagaaatggggttggaatcggtgggagatttagcgattcacgtgattctcagtaagttaggagcccaagacactgccagagtcgcgtgtgtgagcaaaaggttctgttcttccgcttccgacgacactctctggatcaatcactgcttccacgaactcg

SEQ ID NO: 87935 - DNA, 253 bp, Glycine max
  Clone ID: 700908916H1
gttgtgtagcggtggattgggtagaagaagatgagaggggtgaagagagcagtatttgtaggcagagccctaagaagcaattccaacaccgccgtgtacggtgttggtgccacccttcatcgagatcgaatggctccccatggctgcttaaccccatcaaatccaaatccttctgtttctgttactgggtttagatacctttctgcttctgctgctgccacgtctcttgcccaagacgctcagaccaaggcct

SEQ ID NO: 87936 - DNA, 259 bp, Glycine max
  Clone ID: 700908918H1
atttctacgagaatggagtttacactagtgacatttgcggtacacttcccaggatgtgaaccatgccgtccttgctgtggggtatggagttgaaaatggcgtcccatattggctcataaaaaattcatggggagaaagttggggtgagaatggctacttcaaaatggaattggggaagaacatgtgtggtgttgcaacttgtgcgtcttatccagttgtggcataaattgcataagaatatggtccctggtgactacca

SEQ ID NO: 87937 - DNA, 257 bp, Glycine max
  Clone ID: 700908920H1
ctttctctaaggcaatttgtatgatcatccacatcctctttcaaagattgcgtacaacactgaaatatagcagagatcaaccaaagactaaagaaaagctatgctgatcaattcagtcagttggttttacctcccctctcattttcatgtctgtttacaatttgaattgcaagtattttcctattaatttatgtgttaattaaggagacaaagcttggattgctaaacaagcgaaagagtagctagttattcaatca

SEQ ID NO: 87938 - DNA, 228 bp, Glycine max
  Clone ID: 700908921H1
ggaattctgctcgaggattgggggctgctgctgcgagagaaaaaaagaaaagaagaaacagtttgaagtcagatgctagatatgggaagtggagtttcaaccctctgttggtgctctcggatcaacgaacccgacgttattttcaccgccaccgacccattggacgaaaccctaggccactccttctgctacgtcagatcctccgcgcgcttcctttctcccactcgc

SEQ ID NO: 87939 - DNA, 257 bp, Glycine max
  Clone ID: 700908922H1
ctcacattgtcatcctctattgtcttgtgagggtggtggttgaagaggttcgagatgcagaggctcgagttcctctacccactgatgaggttcatacagtgggacaagcccccaatcaattcattcagtggtcaagaagacttgtgaagtctatgtcagccaaggctgttgtcgaatctagcaaagatgctccacacaaaaggttggaacctcaacttgatccgctcgaacgcttgttgataatagtaagcaaaatt

SEQ ID NO: 87940 - DNA, 257 bp, Glycine max
  Clone ID: 700908923H1
ggtcactgacctatcttggaagagttttgaagtttaaaccttcaaacccttttgcctttagattctgattctgagtctctgctgctatatatggcgccacgcgtatttcttgtgttggggatgttgctgatggtgtgccttgttaaggtttcgtctgatccaaagagagaagaagaaatactggaagaagaactacattttcccgataacgagccacttattgtgagagacgggaacagaaggctaatgcaagacat

SEQ ID NO: 87941 - DNA, 260 bp, Glycine max
  Clone ID: 700908924H1
gaaccaccactaccttatccatttccactcctcaccaagccacaccatggcctcaaccaacgccctctcttcagcttccattctacgctctcccaaccgccagtctctgaccagaagagcgaaccacaacggaagagtaaattaccgtcaaccgaatagccgtttctccgtcaaagcctccgccaaagagattgcctttgaccagcattcccgctctgctatgcaggccggcattgacaagctcgccgacgccgtcgggc

SEQ ID NO: 87942 - DNA, 254 bp, Glycine max
  Clone ID: 700908926H1
tttggaattcacgaagaaatgttgaaggacagtgtgagaaccaagacatatcaaaatgttatttatcagaacaaatttttattcaagaataaagtagttcttgatgttggtgctgggactgggattttatcactattttgtgccaaagcaggggcagaacacgtctatgcggttgagtgctcccatatggctgacatggcgaaggagattgttgaagctaacggttactctaatgttgtaacagttttgaaggg

SEQ ID NO: 87943 - DNA, 253 bp, Glycine max
  Clone ID: 700908927H1
gagaattagtgcatgtgaagattccagcaggcaagcgatgtgggtttgtccaattcgcagacaggagctgtgccgaagaggcacttcgggtgttgaatgggaccctgttgggtggtcaaaatgttcgtctttcatggggccgcagtccttcaaacaaacaggctcaggcagatccaaaccagtggaatggtggtgctggttctggtggtggatactatgggtatgctgcacaaggttatgaaaattatgggta

SEQ ID NO: 87944 - DNA, 254 bp, Glycine max; identical to SEQ ID NO: 76024
  Clone ID: 700908928H1

SEQ ID NO: 87945 - DNA, 253 bp, Glycine max
  Clone ID: 700908929H1
cttcttcctctctcttcgttctcgctctcttattcctttctctcttgtcttctctccgaatccacgtcctagatctgttgttctcttcccacagttctcactgaatcaggatccattttgataccaagttgctgtttagagatctgtttccttctagacaacggtctgtgctatctgttattttagttgaatcgaagctgcaacaaaatcttcctgatctttgctttgaggttatggcatcggcgggtgtagc

SEQ ID NO: 87946 - DNA, 253 bp, Glycine max
  Clone ID: 700908930H1
ttcgaaaccatttttcgtgaaaataggtgttttttttagttcgtcgttttgctcttcgtgttgttgaagtgcaacgccatggatccagatcagggcacttcaaaagcccggaagcccaagttcaaacccaggaatctcaaagcagtccgagctcccaaaaccgaagcggatgataagcgaaacgaagatagcgaagtgcctcgagctctctcgcgtcgacgacatgaaaatcctgcaaaacgcgagcctaaag

SEQ ID NO: 87947 - DNA, 243 bp, Glycine max
  Clone ID: 700908931H1
tcgaggtgcctgttctctgtaactgtgtttggagtgttaaaacgttcagcctagtcaaagattcttgtttctgctgtagctttagttagtagctaagcacctcagaaaccagatctctgtagaaagtgaagttttttttttggttcgaattctattctttgttgtaccaacatgctctccacggattcccttttggaaaatttccctggttctgtaaacggattcatatttgaaaacggtccg

SEQ ID NO: 87948 - DNA, 268 bp, Glycine max
  Clone ID: 700908932H1
gctcgaggtctttcgccgcaatttcgaagatccaatttctttcattgctttcattgttcttttgtctgtgattcgaaggaaagggactgtgacgatttctgtgattaggtctcgttcgtcgtaattggcctaaccggccttgccgaccatcctgctatatcaccacccatattctgagtcccttttctcatccaattctttttcttgtatcttttttcaattttaaattgttcttcgctgtcagtattggttgtgtggtatcagattc

SEQ ID NO: 87949 - DNA, 256 bp, Glycine max
  Clone ID: 700908935H1
gagaattcgttttctctcctctgtgtctgtcgtctaaagcttaattccgatggggactccggaattccctgatctcggcaagcattgctctgtttcttattgcaagcagcttgatttcttgcccttcacatgcgatcgctgtaatcagatatattgtttggagcaccgaggttatattaaacataaatgcacaaaggccaacaaacatgatgtcacagttgccatatgccctctttgtgccaaaggagttcgcctc

SEQ ID NO: 87950 - DNA, 257 bp, Glycine max
  Clone ID: 700908937H1
ctactgctctctctctccctctccctctccctccaaattttccttcattctcacgcgccgccgtggtttccgccggcggctactccctatccaccgcgcatccatcccgcttccctctcctcgcttttctcacaaaacaaaaaaaattaaaaatttctccgaagactgtgtattatcgttatcgttcactgagttaggttttgctgttcttcctagggttttattgtgtccaataacaagaggagggggaagagaaa

SEQ ID NO: 87951 - DNA, 256 bp, Glycine max
  Clone ID: 700908939H1
accagctatctcagaactcagagaaacttggacttctgttttttggtttgagtcacttgaatctacaagcaagcaaatattacataataagaatctgttggtatttcctcatgtagatatgttacagaagaagatatcaaaacataaattggctggtcaaaatctgaatccttcggaaggccagataaatgatgaaaccatatctattgaatctggttgtcatcttcctgatggttcattgaacaaggtacctgac

SEQ ID NO: 87952 - DNA, 253 bp, Glycine max
  Clone ID: 700908941H1
ttctcacactcattccgtgctctaaatctcaaattctagggttagggttcccaatttctccgccaatcagaagatgacttccaccggtggttctaccaagggcggaaggggcaagcccaaagcctccaaatccgtttcaagatcgcagaaagctggtctccaattccccgttggaagaatcgctcgattccttaaggctgggaaatacgctgagcgtgttggtgctggtgctcctgtgtacctctctgcagtg

SEQ ID NO: 87953 - DNA, 131 bp, Glycine max
  Clone ID: 700908942H1
aaatagactgtgaggttcttgggaaccagaccggagaaacttaatattttgcaaacaatgtggtcaacggttggcagggtgaacagagaccaaggatctaacttctggtttgacctaacaggagattttca

SEQ ID NO: 87954 - DNA, 194 bp, Glycine max
  Clone ID: 700908944H1
ctgaaaatggatcgagaatggggatcgaagccggggagcggaggtgcggcgtcggcgcagaacgaagccatagaccggcgagagcgtctccggcgactggctctggagaccatagacttggcgaaggatccctatttcatgcgcaaccacctcggaagctacgaatgcaaactctgtctcactctccacaacaa

SEQ ID NO: 87955 - DNA, 245 bp, Glycine max
  Clone ID: 700908945H1
cgctctgtttctgtctctgtatttgcggctgaggattccgaacgagcgaccttcttcgattctcgcaaagttttagtcatcatggctaaggaaaagactcacatcaacattgtcgtcattggacatatcgactctgggaagtcaactaccactggtcattttatcaacaagcttggaggtattgacaagcgtgtgattgagaggttcgagaaggaggctgctgagatgaacaagaggtcattcaa

SEQ ID NO: 87956 - DNA, 264 bp, Glycine max
  Clone ID: 700908947H1
gaattcggattgagcgaatattatcgcgatgttgaattcggaggatctggaactgcgtgttgttgcgttggggtgcgcgctggagatagggtacttcgggcggaaggaagcggtggaggcgatgatgaaggaggggttggtggagaagctggtggagttgcagaggtcggagaaaggtggggatttgattgagattggaagggaaaaggttagtggggttttggagagaaaaccttttgcgagctgcgtggcgaggtttgcggt

SEQ ID NO: 87957 - DNA, 251 bp, Glycine max
  Clone ID: 700908948H1
atcgtgtctgattcgtttggaactgtacaagacccagcttcaagagctggcccagcggagtgcttcaacctgccttcctacacgtgtattcggcaaggtcccgatcacgcgccaaggttcaaggccaccgtcaactttaacggcgagatcttcgagacccctcactactgctccactctccgtcaggccgaacactccgccgccgaagccgctctcaattccctctcccaccgtggcccctcccattccct

SEQ ID NO: 87958 - DNA, 269 bp, Glycine max
  Clone ID: 700908954H1
ggaatttggctcgagctcgagccgggctaagacagagcactgtctgagtgaaacatccattcttttcctccacctcgtgattcccacacattctcttcttattcccagctccacgcgctcgtttctatattctcatcactcgcgctcttcttctgcttcttctccctccattagggttgtcttaatgctgaatgtggcttccctcgccgcacattgacccttgacacaccataatgtccggccctctcgactgtttcgcaagaccctgt

SEQ ID NO: 87959 - DNA, 253 bp, Glycine max
  Clone ID: 700908959H1
gttgggtttagaatcttcaatcttgtttgggagagagatgtacatagcttccatgggaaggtctttcaaggactccttgaaactgcttgaagctgatattcaccatgccaataccctggcgtcagattttccaagggaatatgatggtgcgtgccttcagatgagaatgtcatatagtccagcagcacacctgtttctcttattggtgcaatggacagactgctaatcttgccggagcccttggactgttaag

SEQ ID NO: 87960 - DNA, 247 bp, Glycine max
  Clone ID: 700908962H1
actctaaccaacttacccaccaactaataatctttttaattccaaaaaaccaaacaatgcctctttttctcacttcacaacttttatttctgtttgagttctccaatggcagctcctgcaccattctctctttcttctgatcccttcgcttccaaatctgccacatcaacgatctttggtcctgccgcgctgaaaaaagggaactttgagcaaacccatttcggaattttcacggctttaaggagaa

SEQ ID NO: 87961 - DNA, 276 bp, Glycine max
  Clone ID: 700908964H1
tcagacctaaattcggaacgaggtgagcttccagttgtattcatggacttaccggagaagcttttctttgcagcatttctcattctttcagtggccattgatggaacgcaggcagacaccatggtcactggcactgtcttctgtgaccaatgcaaagacggacagagatcccttttcgattatcctattaatggtgcaaaagtaactctgtcctgtgctgacagtaatggacaaattacaatgtcaagagaagaaacaacaaactggtttggaagc

SEQ ID NO: 87962 - DNA, 254 bp, Glycine max
  Clone ID: 700908966H1
ctggaagagaagtggaagtggaagtgggagcagaagtggaagtggaagtgggagcagatgcagcttccacttccacttctgatgccctggaagagaaggcctggtttcgccccaccagtctcgaggatttcgagaagcctcacacccttccttaacaacccctttctttctttcaattaggacatcatatatattatacaaaattaaataaataaacactagtcagtagtagtgactagtgaccaagtggaagt

SEQ ID NO: 87963 - DNA, 250 bp, Glycine max
  Clone ID: 700908968H1
ctctctttctctttctctctttccctgggttggagaacttgcaggtccttaaaattaaaccatggcttcatctttaaaccaacgcatgttattccctcttatgttcgtaattggtatgttctgcttaatggtaactccttctattgcggaacttcccatattcaaacaccctccaaaaaaacaacaatctcttaatatattggtccttggagattggggaagaaaaggaacctacaatcaatctttggtc

SEQ ID NO: 87964 - DNA, 252 bp, Glycine max
  Clone ID: 700908969H1
acaagatcccggaaaggcgtgccggcgtcagagactcatcagttctcactcgtacggcgttgtgctttgctttctcaccttcttcttcatttctttcatcatcatcatcatcacaatataaagtttgctcctttctcagttttcacccatacccagatgtgtaacagcaccatctcggatctgtgtccctcctttaagtgaaaaaggttcaatctttggtctctgaggctgttgggttttcgtcattgaaga

SEQ ID NO: 87965 - DNA, 252 bp, Glycine max
  Clone ID: 700908971H1
aaaaaagtctcctttatatctatttaaattgcatggattccattttttttatttataagaattaattcgattgtaaaaaaatcaagaattcttaagtaaattaagtaaattcagatttatataaaaaattcaaaattagtgtcattactattactgatcaatcaaaatatctatcaaaagtaaaaagcgaagagaagggaaaaactttaatttttttatggtaaaaaattcaattatacctgttatttcaca

SEQ ID NO: 87966 - DNA, 256 bp, Glycine max
  Clone ID: 700908260H1
aatttaaagaaatcaacacacacaaacacaacaacatatggaggtgctaagggtgcaaaccatagcttccaaatccaaagatgctgccatcccagccatgtttgttagggcagagcagagcaaccaggcatcacaaccgttcaaggggtgaaccttgaggtgccaattattgattttagtgacccagatgaagggaaagtggtgcatgagattttggaggcaagtagggactggggcatgttccaaattgtgaacc

SEQ ID NO: 87967 - DNA, 255 bp, Glycine max
  Clone ID: 700908261H1
ttggcattgagtgtgaaacaggctaataaatgtgagtggttcaccgccgcaacttccaatgtgcgagcacttactcgtctcactgtcttgctatatttgggtgagaacacagagatagtggagttcaacgagatggagcaaataaagcacagaacagttgaagtgaatggcataaaaatgcatgttgcagagaaaggagagggtccagtggtgttgttcctccacggcttccctgagctctggtactcatggcgc

SEQ ID NO: 87968 - DNA, 260 bp, Glycine max
  Clone ID: 700908264H1
aagaagaagaagaagaagaaaaagggaaaaacgcaagaaaaatagaggaagatcgatcgagatctccctcgcgtttgtctcagttgaagaaattaaaaagcagaactagagtaaccaacggtctcagaattttcagggttttcagtacttccatattttttcttccggatttgagttggaagaagatcgaagaggtttctagttgcttcaattgttcctctgggtggtggagacttgttatatttttaaaatattgacaa

SEQ ID NO: 87969 - DNA, 266 bp, Glycine max
  Clone ID: 700908265H1
caaggatggtgttcatcgtccgatggcgcataaaacgcaaccaaagccttagcaaaggcatggtagcctcaagcatccttgagccaggagggtttttgggtgacgagctgctttcatgtgccttcgcaggccgtttatcgatagacttccggcctcctcggctacatttgtgtgtcttgaatcatcagaagcctttggccttgatgccaatcacttgaggtacatcactgatcacttccggtacaaatttgcgaacgagaggctga

SEQ ID NO: 87970 - DNA, 258 bp, Glycine max
  Clone ID: 700908267H1
gttttgatcgtccctcttcccaatttcagggtaagctttggatctcggatcggtgccttacccatcttttcgaaatcttcaaggaacgctttgggacactaaagtttccaaatgtagagggaagaacagaatgagagggaagacttgaatcaggattcaggggtgagatatttgaggatggttacttatggtgaaaggtgggctgaaaaataggaagtaagcatggaaaatttggtgagcaagtaatttgatctgctg

SEQ ID NO: 87971 - DNA, 252 bp, Glycine max
  Clone ID: 700908268H1
ggagagtgagaataataaagaaagaaaaagaagggttttgataaagcaaaagaatattattgaaacataaattttggactttctttgcatttggcacccaccccacaacgaaataaacaaaacaagcacacaaccagagacacgcacacgcatatagagagagagagagagagagagaagaagaagaaggaagcagaggaagaagaaggaggagatcttgagagatcaggtcgcaactgatcatggggagag

SEQ ID NO: 87972 - DNA, 255 bp, Glycine max
  Clone ID: 700908269H1
gttgatcgagataactagaaacagtgtgatgaaaatgaaggtccttgttttcttcgttgctacaattttggtagcatggcaatgccatgcgtacgatatgttccctctccgaagaacactggctatggtgcccgtactccggaggtgaaatgcgcaagttggaggcttgctgtggaagcacacaacatctttggctttgagaccattcctgaagagtgcgttgaagcaacaaaggaatacatccatggcgaacaa

SEQ ID NO: 87973 - DNA, 257 bp, Glycine max
  Clone ID: 700908270H1
ggaaaacaaagtatagagtgaaagaatgggtgagaaaagcaagattttgatcataggaggcaccggctacatcggcaaacatatagtggaagcaagcgcaaaggctggaaatccacttttgctttggtgagggaatccacactctctgacccctccaaggcacaactcatccacaattttgaggctttgggcgttaatttggtccgcggggatctgtacgatcatgagaagttggtgaaagctatcaagcaagtaga

SEQ ID NO: 87974 - DNA, 255 bp, Glycine max
  Clone ID: 700908271H1
gctcttcttccagacagcagcagcaacaacaaacaaactctttctggattcagtttttgatgtgaaaatggcagtgactcttacatcaacactctttctggctttgctatttctgcttcagcttttgctgctcttcagcctagagtacctgaagcttacctccaaaatgggaactttgaggagcagccaaaccctaaatacctgaagaaaacaaagctctttggtaaatacgctttgcctaaatgggagatcaat

SEQ ID NO: 87975 - DNA, 255 bp, Glycine max
  Clone ID: 700908272H1
ctctcgttgtagcgtaggcagcagttgaatttggaaaacaagatctctcaccgcaagttcgaccacccgagacacggttcccttggctttctcccaaggaagcgagcttctgtcatcgcggaaaggtgaaggctttcccaaaagacaatcctagtcaaccatgcaggttgactgcctttgtgggctacaaagctggaatgacccacattgttagagaggttgagaaacctggatcaaagcttcacaagaaagaga

SEQ ID NO: 87976 - DNA, 149 bp, Glycine max
  Clone ID: 700908273H1
catgttttggtgccgaatcatggctcatttcatgtcgggtgcttcattgttgtaaatgattgatgattcatgataacaacaaatggccgactccagatactaaattgttcatgttgttggaatgtaatcttttgcacagacttttggac

SEQ ID NO: 87977 - DNA, 248 bp, Glycine max
  Clone ID: 700908274H1
tactctgttatgctgctccttcctttctgatttcaagggtttaaaccctaaaaaggacccacggcgagaagcttccaactcctctctcacgcgcggacctccccctccggcacttctgcaccgacggacgggtaaaggataaagggatgatctacacagcaattgacacattctacctcacagatgagcagctagcaatctcaccttctagaaatgatggcatacatgaagccactgagaccagcctt

SEQ ID NO: 87978 - DNA, 250 bp, Glycine max
  Clone ID: 700908275H1
gagtgagtaggttactggaaagaggaatggagaaggaagccgaattgggtgaaaaggagtttgaacaaatggtgcgggctttgccttccgatgctgtcaaggagttattgtgcacggggtgggttcgcttcattgcttgcaattcttcttcttcttctgctaaccttctgctatttcacagctcctatatgaaaaccaaatatggatcccaacctttgttccatgaaaacttgcacagtggatgcatctc

SEQ ID NO: 87979 - DNA, 254 bp, Glycine max
  Clone ID: 700908277H1
ctcagatttctgtggggtgttcctcatgtcacggaagtaaaggcaaaaggaggtttctcttcttacctatatgaacttttggtgttgaatttggttggtgtttaaattattaagagtgtattggaggattgtggagaaggaagtgttgaggttgattgtggagttgaaaaggattgaacttgttttgttgattattgtttgttgaagtttggtttttctctcaatggctgtagaggagtctgagcctgtgattg

SEQ ID NO: 87980 - DNA, 257 bp, Glycine max
  Clone ID: 700908278H1
ctcgagccgctatctgcttcctcgtagtacttcattgagagagacatggacactgtactaagtactacgctgctactcatgttggcatgctccatcgtgcatgttcttcgttactacaagcaagaatgagaagaaaatcaaactacaatcttccaccaggaccctctcttctcaccatcattagaaactctaaacaactctataaaaagccacagcagacaatggccaagcttgccaaaacctatggccccataatg

SEQ ID NO: 87981 - DNA, 267 bp, Glycine max
  Clone ID: 700908280H1
cacgtttcccttttcttttgctcggaaagccccagtcacgtcgaactacatcaggttgcacgtaaataccgtggacaaccctagacgatccaacgggcgagatgtactccgcgattttaacaaagacgtcaatgctggtgagtactctccgtactatcttcaaggagcaattacggctctgcagcgttttctgccgtctaacgaaacggacgctgactcggacacggaggctcaacccgacgcggcggtggacgcgtactcgtgcga

SEQ ID NO: 87982 - DNA, 276 bp, Glycine max
  Clone ID: 700908281H1
cgcaatcatattaagccagtgccaccttcaacttctcaattgtgctctctctctgcctagccttctttctactgctactcaccaaggcaaactcaaccaacaccgtttctttcaccgtcagcaagtttccccacgccaacaaaaccttatcttccaaggagatgctgctatctcaccctccggggtgttacgactcaccaaggttgacagcaacgacgtgccaacgacgggatccctaggacgtgccctttatgctgccccaatccagatttggga

SEQ ID NO: 87983 - DNA, 111 bp, Glycine max
  Clone ID: 700908282H1
aaatgatcacaatcaggtgacatgcggataagtgagtgatcaatgagtggctctgcctgcccacttcggcgctctattctatatatagcgatggcatccaccacacctgca

SEQ ID NO: 87984 - DNA, 256 bp, Glycine max
  Clone ID: 700908283H1
ttactaccaagttctctgtctggggagttcttagcaccaccaccagcttctgcagtagctttaagctacgaaagattttccttgaccatggggcaaaagcatttagtgacgtgttctgtttatgggctttgacatgttcccatcttctatctttctcctttggaattctgagaatttgtctgaagaagagacctctagatcttgatagtattaatgctgctagaaaggcaagagcaagtctaagatctgtaagacc

SEQ ID NO: 87985 - DNA, 257 bp, Glycine max
  Clone ID: 700908285H1
ggaaagcaaaacatgcctacacagcataaatcagaagaagcataaaaaaatagcaacacgcaacacattctcaacaaaagaagcaaagcatgtgcacggttacacaaatggaatacgttgaccatttctttgcctccaaaatccataacgttacttctctcatcttccatggataaaacagtgaggttgtgggatttggaaactaagtcgtgcttgaaattctttgcacataatgactatgtgacctgcgtgcagtt

SEQ ID NO: 87986 - DNA, 256 bp, Glycine max
  Clone ID: 700908286H1
ggagaagagaacggaggagaagagcaatagctgcgaaaatatactctggacttcgagctcaggggaacttcaacttgccaaagcactgcgacaacaacgaagttctgaaactctctgcgcagaagctggttggtgcgtggaagaagacggaaccacttatcgcaagggttgcaagccacctctggccaatggtgcagggagctccatgagaaacattaccttttcttcttctcaaaatccaagtcctctgtcttcg

SEQ ID NO: 87987 - DNA, 254 bp, Glycine max
  Clone ID: 700908287H1
cagttcttcacaccaatcatgtaccgctttgcaacctccctcgcctccaaagctagaattgctaggagcagcactcaacagattggaagtagggtcagttggaacaggaatatgctgccaaagacattaagtttggtgtggaggcccgggctttgatgcttaagggtgttgaagagctcgccgatgccgtcaaagtaaccatgggccctaaggggcgtaatgtggttattgagcaaagttttggagcacccaaa

SEQ ID NO: 87988 - DNA, 252 bp, Glycine max
  Clone ID: 700908288H1
ggaaagggtgtgagaagagaatggagagtaaagaggaagatgttaacgttggagcaaacaagttctcagaaaggcaaccaattggtacagcagctcagggtggtggtgacaggactacaaggaggcacccccagctcctttgtttgaacctggtgagctcaaatcatggtccttctacagagctggaattgctgagtttgtggcaactttcttgttcctctacattaccatcttaactgtcatgggtgtcaa

SEQ ID NO: 87989 - DNA, 252 bp, Glycine max
  Clone ID: 700908289H1
tttcttctcctctctctctctcctagggttagggttttctctcttcatcactctctgtgtcgctccgtttcaatggctcagcaagacgctcaaaacggcgggtcggagatgccgctgctgctgctacggtgtcgtttgtcgctgtgaagccgcagctcctcgtcgaagctcccaaagccaacgacgccattctgttcttcaaggctgcgtttggcgctgaggaagttggccgtacgctcaaccctaagcgca

SEQ ID NO: 87990 - DNA, 108 bp, Glycine max
  Clone ID: 700908290H1
gagaaaattgaattgcgtgagtgaaagttacatcagccccttacgcgcaaaccaattccaattccctttgcaagcaagcaatctcagatagctgatccacacaatccc

SEQ ID NO: 87991 - DNA, 252 bp, Glycine max
  unsure (1)..(252): unsure at all n locations
  Clone ID: 700908292H1
atttccacacgtcataatagataaagnccagttgaagtgatactattgaacagccgatatatgacactctcatgatatancntgtatcttgtgaaagtagcattagacaataatgagtgttgactaatctcttgttttactgatctttctaaaatataaagctacagaatacaaagtttgtatggttgaagccaagcaatttgtcgggatttttgtttatctcacaatatgttagagctttgttttgaagtt

SEQ ID NO: 87992 - DNA, 89 bp, Glycine max
  Clone ID: 700908293H1
tgagagcaagagaatatcccttgtcggtggaaatcacactgccgccagattttgcactcgctaaaacaatattcattccacaacctttt

SEQ ID NO: 87993 - DNA, 254 bp, Glycine max
  Clone ID: 700908294H1
agaacagtgtaacaaaaagaagaagaaaaacaatatgaagttcactataatcacaatatttttctctttatttctacttgactttggttttgcacaacagggggatcttgcatatcaagatttggaggaaaaccaaatacaaatataggccaggctttcttaagtgcctggactcaagcatgtgcatcaccaactgctgtcaaaattgtgattccagctggcacataccaaatgggtgcagttgatgtcaaagg

SEQ ID NO: 87994 - DNA, 255 bp, Glycine max
  Clone ID: 700908295H1
ataaagttctctctgcttctctctcttagactcaaaaccctattgcgtgctttgcaatcgaccccgattatggccaacagtaacctccctcgaagaatcatcactgacaccagcgtttgctcagtgagccagcacctggaattagtgcgtccccttcggaagacaatatgcggtatttcaatgtgatgatccttggcccaactcagtcgccttatgaagggggagttttcaagttgcgaattattcgtgccagaa

SEQ ID NO: 87995 - DNA, 255 bp, Glycine max
  Clone ID: 700908296H1
gcagatgcagatgcaacaaacgcagcagcagctgcaggccacggcggcaccattctcgacctccactcctcctcctcctcctccttcctccggcggctccgcgtccgaggaccgccgaagcaggtggctcaagcaatggacaagctcggacaagccgaacgaatcatcgccgacatccgaatcggcgccgaccgcctcctcgaagcgctcttcgtcgcggcggcgcacctcgaccaaggcaacaagcctctccaa

SEQ ID NO: 87996 - DNA, 261 bp, Glycine max
  Clone ID: 700908301H1
ctcactgggatggggtgcagtgctagtctcatttccttggacatcataaggtacattttcaagtcacaaaagaacaagattgctcttttggtgacttccgagtctctaagtccaaactggtacaatggcaacgacagatcaatgtttctcgccaactgtttgttcaggacgggtggatgtgtcattctcttgacaaacaaaaggtccttgaagcaaagggccatgttcaagttgaagtgcttggtgaggactcatcatggt

SEQ ID NO: 87997 - DNA, 260 bp, Glycine max
  Clone ID: 700908302H1
agatgatcaagtatctgattcttcttctgatgaaagaacacgatcgagcacgcctcaggacaataacactgaagctggaacaagagatggagcgagaaataacaatggtaataaaagcgagttgggtagggaagagagtccagactcagaatcacaaggttggggtcccaataagcttcagaaagtgaacccttccaatcctatggatcaatccactgcagaagccacaatgagaaaagctcgtgtctcagttcgtgccc

SEQ ID NO: 87998 - DNA, 260 bp, Glycine max
  Clone ID: 700908305H1
attttatgagatgggtactagggtgcagctaagaagctcaaaaagattcaatttcaaggtttgtagtggaagttatgatgatggttatgtgattggtgaagaggaagcaagggatatttcagggttagaggagcctgtaacaaccaaggttctgattccaggtctgcctgatgattcaaaaggtgaatctggtgctccaataagtagttgtttttggggatggaaacctaaactcaatgtgcactatgagaaggccgggt

SEQ ID NO: 87999 - DNA, 259 bp, Glycine max
  Clone ID: 700908307H1
ctaaaatccttaaaagcaatggtgctatcaccaacccccctatgtttgctcgatattcttcttcttcttcttcaccctcagtgccttatgtttctaactaccagaaacaaacagctccatccccaacttcttcatctgggaatagaataagccctgcaattcttgtcatcatagtaattttagcagtggtgtttttcatcttgggtttccttcacttgcttgttagatttctcataaagcaaaggtcttcctccaattc

SEQ ID NO: 88000 - DNA, 260 bp, Glycine max
  Clone ID: 700908308H1
gtccgcggcaagatatccaagtccattcgacaggccttggaccagcccctgaattacgccagaatatacctggccgataccataccagaaaacgtgaaacgtgtgatatattaggactctgacctggtggtggttgacgacatagccaagctttatggtgttgatatgaaaggaaaagtcgtggctgcgccggaatattgtcatgcaaacttcacgctgtatttcacggataatttttggtcggacccggttcttgccaa

SEQ ID NO: 88001 - DNA, 261 bp, Glycine max
  Clone ID: 700908309H1
cgcacattcgtcccggcaagggaaaaatgcgtaaccgccgctacatctctcgccggggaccacttgtggtgtacggaaccgaaggtgcgaaggccgttaaggccttccgtaacgtccccggcgtcgaggtcgccaacgtcgagaggctgaaccttctgaagctggcccccggtgggcacctcgggaggtttgtaatttggaccaagagcgctttcgagaagttggattcaatttacgggtcttttgataagccctctgaga

SEQ ID NO: 88002 - DNA, 262 bp, Glycine max
  Clone ID: 700908310H1
cgacatcttctgcaacacaacaactaaacattgttttgtttactcaactcgcactttcccttctccaatttcgaggtctcaattccggccacaagcacgcattgtttgttcaaggttcaagccatcattcaagacattcatggaagtagttaatgaaactagacctgttttcatctgatatacttaaaaagggttcacatggtttcttcagacaaaagtgcggatcaaaatatcccttctgataaattgcagcagagagtga

SEQ ID NO: 88003 - DNA, 261 bp, Glycine max
  Clone ID: 700908311H1
aacagagaaaaaaaaagttgtgaattttccagttgcgtttctgttccatacaatttcgaatagaatggcgaggcctaatcaggaggcagttgagacgttcgtcagcatcactggtttgccagaagcagtagcgctacaaaaacttgaggagcatggtggtaatctcaatgaagcagtcaatgcacattttactgaaggagacagaaatctaacgaccggttctcacaacagctctgctgtatttcctcaagatgatttcat

SEQ ID NO: 88004 - DNA, 256 bp, Glycine max
  Clone ID: 700908312H1
tttatgtttgtttttgcgagcgtaaggttgaggagaagagatggtgggagcacggccacgggacatagatgacttgcccaagaacgccgccaactacacagcgcttacgccgttgtggtttctagagagagctgctacggtccaccccaccagaaactccctcatccacggatctcgtcgctacacgtggcagcagacttaccaccgttgccgtcgattcgcctccgctctttctaatcattccatcggtcttgga

SEQ ID NO: 88005 - DNA, 263 bp, Glycine max
  Clone ID: 700908313H1
gatggcctcacaggtttgcaaagctgcttccagagccgcgaggtcccttctctccgcttccagagcctcccatggacgtgcggttggggctgctacggctgtttcattgagctgcaaagtgcctcttttctacggaaagaacggttctggaagtggttccgcttcatcatcatcatcatcatggatttcaggagcacttgctcttcctgccgcagcttacatgttccaagatcaggaggtgcgcgcagctgagctggagcgca

SEQ ID NO: 88006 - DNA, 260 bp, Glycine max
  Clone ID: 700908315H1
tgaagcctttccagtgtgcagctgcatctgcagccggttcaatcattcaaaattgtcaagttgtttggtttggagcaatcatcattgtccaaattgcaattttttcagaaggatagcaagaatttgggaagttgctgaagcaatagggagtagtggatacggtttaggatcattgttataataggcaaaattgatggtaatcgtacatagtggctaggaagggatataatggctactgctgcagttattggactcagtgg

SEQ ID NO: 88007 - DNA, 266 bp, Glycine max
  unsure (1)..(266): unsure at all n locations
  Clone ID: 700908316H1
gacattgtgaccaccacgactcacaagagcttgcggggcccacgtgcggggatgatcttttaccggaagggccccaagccgccgaagaaggggcagccggagaacgcggtttatgatttcgaggacaagattaacttcgcggtgttcccttcgctgcagggtgggccccacaaccaccagatcggtgctctcgccgtggcgctgaagcaggccgcgtcgcccgggtttaaggcctacgcgaagangttaaggcgaacgccgttgcg

SEQ ID NO: 88008 - DNA, 256 bp, Glycine max
  Clone ID: 700908317H1
gtaactaacccagtcccttgacttggctttctggttcgattcgatgcgattctcggagatgaagaagggcttgatgcatagctatggcgttgctgtgattgtgttggctttgagtttgtgtttgggttcatcatcggagcaattaagttcacgagaatgcgagaatctcggtttcaccggactcgccttgtgctccgactgcaacactctctccgagtacgtcaaggacaaagagttggtatcggattgtttcaag

SEQ ID NO: 88009 - DNA, 253 bp, Glycine max
  Clone ID: 700908319H1
ctcttcttctcttgcggctacggttttagcgcagttcttctagatttaaggaagatgggtaacgaaaaggttcacatcagtattgtggtcattggccatgtcgactctgggaaatccactaccactggtcacctgatttacaagcttggaggcattgacaagcgtgttattgagaggtttgagaaggaagctgctgagatgaacaagaggtctttcgagtatgcctgggtgctggacaaacttaaggctgagc

SEQ ID NO: 88010 - DNA, 258 bp, Glycine max
  Clone ID: 700908320H1
gcgatggcgatcttgctgggcgaaattcttcaatcgctggagctgtggctgaagctgatcaagaacccgcagcctcagccctacgtgaaccctaatctggaccccgttttgctggtgcccggtgtcggaggctgcatgctgcacgccgttgacgaatccgaaggaagccgagaacgcgtctgggttcgcttcctcaacgccgagtacacgctcaagaccaagctttggtcgcgttacgatccttccaccggaaaaacc

SEQ ID NO: 88011 - DNA, 237 bp, Glycine max
  Clone ID: 700908321H1
gtcaggtgacatgcggggaaccttatggtcccgcaccttttgccgacgaggggtaaacgagcccgttgacgtgcagagactaacatcgtttcctgcaccttttgtcatcctgacccgtgaagtcaggtgacatgcgtggcaaccttatggtcccgcagcttttgtcaaccagagtcaatcgagcacattgacatgcggggaaccatttggtctcatacttttttcacattttgtcat

SEQ ID NO: 88012 - DNA, 255 bp, Glycine max
  Clone ID: 700908322H1
gaaagagaagcattagcaaaagcaagaagaactagtctaagcagaaatggcctcttcagtgatggcatctgtggccctcaaacctgcccctttcactgttgagaagtcctcagttagaggccttccctccctctcaaggaactcctcttcattcagagttgtggccagtggtggcaagaagatcaagactgacaagccttatggaattaatggtggcatggctttgagggaaggagttgatgcatctggcaggaa

SEQ ID NO: 88013 - DNA, 256 bp, Glycine max
  Clone ID: 700908323H1
ctttttcttctttgcttgccaaaaatcttacacacacaggtatctagaaaatgggttctcaccagcaagaaccatggctattggagaatgggaaaccgagggtgttgaccaaggagaataggcatggccgttctgcacacagcatgtcctccacgtctttgcgcaagaagtctagccgaactcttgtctccaagcttccatgtgccacactcagaagcatccttttaaatttgcaagaggttattcttggtaccaa

SEQ ID NO: 88014 - DNA, 259 bp, Glycine max
  Clone ID: 700908326H1
ccgccattttccgatcatcaaatcaaatcctctttatttatttattttggcttaatttacaaaaaaaaataataacaaatggttctatgagactcacgaatacgcatgcgatggatctagaaggtggaacaactcgtcgaaactccgttaagagagagtcgtggagaacggttgtgcatctggcgtaccagagtttaggagtggtgtacggtgatttgagcatttcgccgttgtacgttttcagaagcacgtttgcgga

SEQ ID NO: 88015 - DNA, 256 bp, Glycine max
  Clone ID: 700908328H1
cttcttcccaaccactactactcactcactgcagatctcaattgcatcgctgtccatggctaccatcgttagcatcaaggcccgccagatcttcgacagtcgtggcaatccaactgtcgaggtggatttgacttgctccgatggtacttttgccagagctgctgttccaagtggtgcatccactgggatttatgaggcccttgaattgagagatggaggatctgactaccttggaaagggtgtatcaaaggctgtt

SEQ ID NO: 88016 - DNA, 261 bp, Glycine max
  Clone ID: 700908329H1
tgtgaagatctcaaagtgaagtacaacgaagagatggcaaagagaaagaaactcttcaatgaagttcaagaggctaaagggaacattagggttttctgtcgatgtcgtccattgaataaggctgaaatctcagctggatgcaatacaattgtggattttgatgcagcaaaggatggttgccttggaattttgacaagtggctccaccaaaaagtcattcagatttgacagagtttatacaccaaaagatgatcaagttgat

SEQ ID NO: 88017 - DNA, 263 bp, Glycine max
  unsure (1)..(263): unsure at all n locations
  Clone ID: 700908330H1
actcaacctcactcactcgctcattcgctctcttcacagtttccagtcgagggttcccggtcnnaatcnaaaccgaananananaaaacgtcaatcctacacacacacacacacatatcacctaaccatcgtcggtgggattcgaaggcaacggcgtcgtttcttcgccgccgcaagctctcatcgagagactgaaagactacggccaagaagacgttttcgccctctggttacgagctctaccccgaggaacgcgagtttct

SEQ ID NO: 88018 - DNA, 264 bp, Glycine max
  Clone ID: 700908331H1
aattagttcattctctttgcgcagttccctacctctcctttcaagatgcagatcttcgtcaagaccctcaccggaaagaccatcacccttgaggtggaaagctctgacaccatcgacaacgtcaaggccaagatccaggacaaggaaggaattcccccggatcagcaacgtctcatcttcgccggaaagcagctcgaggacggccgtaccctcgccgactacaacatccagaaggagtcaacccttcaccttgtccttcgtctc

SEQ ID NO: 88019 - DNA, 264 bp, Glycine max
  Clone ID: 700908332H1
cttaacgttttcatgggtattcgcttttcgtcctcccaggcgggcgcgtcggaatcgtcgccggcgtcgagtttgggcgaattgcccgagagttgtgtcgctcagatcatgacctacatggatccgccccagatttgcaagctcgcaaccctcaatcgcgctgttcgcggcgcttcctccgccgatttcgtctgggagtccaagctgccgcccaattacgacgtccttctccgccgcatcttcgccgatttcccctcccatttg

SEQ ID NO: 88020 - DNA, 253 bp, Glycine max
  Clone ID: 700908333H1
ttgagaagtggaggcactgttgatatggaggatgaacttgtgggtaaggatcgctatataggatccattgagagcctcataaggaacaatattcaacaatataagatagatatggccgatgaggttatcaatgctggacgtttcgatcaaaggacaacacatgaagagaggcgtttgaccttagagacattgttacatgatgaagaacggtatcaagaaaatgtccatgatgttccttctcttcaggaggtaa

SEQ ID NO: 88021 - DNA, 254 bp, Glycine max
  Clone ID: 700908334H1
attcaaggtcctgtttatgtgggtactggatgtgtctttaatagaacagctttgtatggctacgagcctcctattaaacccaagcataaaaagcctgggttgcttcttcactctgtggtggtaaccgaaagaagagatcaaaatctagcaagaaaggctcagacaagaaaaaatctagcgagaatgttgacccaactgtgcccatctttagtcttgaggatatagaagagggggtggaaggtgctggatttgat

SEQ ID NO: 88022 - DNA, 251 bp, Glycine max
  Clone ID: 700908335H1
ctcttcgcaatcttcttcgtctctctccacaaagcacttttgcgtttcggtttgcttttcgtgctcatggtaattcctgttgatgaaaagagcaaattcggtcgaaaattatccaggtacatatgcaagcacgtttgcgcttactttcccatcacgcttcatgtggaggacatgaaggcctttcatcccaatcgtgcttatgtttttggttatgaaccacattcagttttgccaattggagttgttgcgtt

SEQ ID NO: 88023 - DNA, 255 bp, Glycine max
  Clone ID: 700908336H1
gctcaacgtcgcacctgttctccctccaaaagaattaaggtaatggatattttgttgttattatgtgttctcttggttgcattgccaaacttggctgtagtagagagtcgcagggctcctgttctggactattttgagtattgtgctatgagctgcagagcttacagtgcctcattggaagaatttggaggggttggtgatggaacaactttgaacacaaaagcttttcaggcagccatagatcatctgagtcag

SEQ ID NO: 88024 - DNA, 252 bp, Glycine max
  Clone ID: 700908338H1
cccgaccaccggcttgcaacgcgcagtgggtggcttcgggggtttaaggatcttcagccgtctgttgatcccagtgccctatgctgatcccgccgatgagtactgggtgctcatcggtgactggttcggcaagagccacactgccttgaaacaaacattggacagcggacgcagcattggcaggcccagtggggtccacatcaacggcaagcgcggcgggctcgaggccctctacaccatggagcccggaaa

SEQ ID NO: 88025 - DNA, 258 bp, Glycine max
  Clone ID: 700908341H1
cttccatattcatattattcgcttccctactgtgccccatcaaagatacaggatagtgcagaaaatcttggggaagtacttcgtggtgaccgcattgagaattctctctatgtgtttaaaatgcgcgagccacaaatgtgcaatattctgtgtaatcttaaacttgatgctaaaactgctaaggagttcaaagagaagatcagtgatgagtatcgggtgaacatgatcctagataaccttcctctagtttttcccttg

SEQ ID NO: 88026 - DNA, 255 bp, Glycine max
  Clone ID: 700908342H1
atccaattgaaattttaaaaatgactgggataaacttaagaattcaattattgaaattgaataagtaaacaatttaattggattggtcgaatggtatcaaaaaaatggagtactaactcccatttcttatttattattgaattaaccgatcaacttgctttgttatcgaacatttctttttgatttcaaaaattttccggaaaaaatttgaatctatttttatatgcgaatcaatcctactacttctggtcctga

SEQ ID NO: 88027 - DNA, 258 bp, Glycine max
  Clone ID: 700908343H1
cgccctccaagcataaaatttgcaggattagacatttccagcaacacttgaagtggtcaatcaatggccatgaagccctcaacttccacaagtgggtctggagagaagattagaaagccttatactattaccaaatctagggagagctggtctgaggaagagcacgacaagtttctcgaagctcttcaactatttgagcagtgattggaagaaaattgaagattttgttggttcaaaatcagttattcagattagaag

SEQ ID NO: 88028 - DNA, 254 bp, Glycine max
  Clone ID: 700908344H1
catatcccgccctagctacagagcagccaaaggggaggaataataataagcctatattctaaggccggaaaaataaaaaaggaataacaaaaatgtctggaaaggtaattatctcggctgtttctctcatcctggtggttggagtggccataggtgtggtggtggccgtcaacaagaagggcgaggatcccacacttcaatctcaacaaaaatcagtaggggttatctgccaaaacactgatgaccagaagctc

SEQ ID NO: 88029 - DNA, 259 bp, Glycine max
  Clone ID: 700908345H1
atctcctcccccaccataccattacacatcaccacctcctccttccccagctcctgctcccaagtacatttacaaatcacctccacctccggtttatatctatgcttccccacctccacctatctacaagttagctcaaattgtgaaagcaccattcatgatgaatcatgttctagttttcatcgaggaataaaggcaagctctattttgagccaagtgaaacatctatcttcctgtctaagttctttgaataaaagtc

SEQ ID NO: 88030 - DNA, 255 bp, Glycine max
  Clone ID: 700908346H1
gcgcatgatgcctttgtcggcaactggaagcctagcaagaatgatactatggagaatcgtcttcctggatttggcactacaatgaacattctctatggggatggtgtttgtggacaaggtgatgtggactcgatgaacaatatcgtttcccattaccagtattatcttgaccttctaggtgttggtcgagaacaggctgggccccatgaaatccttacatgcgctgagcaggttcctttcaacccatcttccaaa

SEQ ID NO: 88031 - DNA, 259 bp, Glycine max
  Clone ID: 700908347H1
cgcgttccttccgttccgaaccaacgccaaacagggttcataacacctccatttcattcccttcttcgaatcgctcacaactaagaagttttgcagttaaaaatactgcaaagtacggttattccaatattcttctccgaaggcgtaatctagcgcacgagtaagatgaaacggagaaagcgcaccacagcgagagcagaaacgaagaagacagactgagcgacttacccgaatgcgttctcctgcacatactaacatt

SEQ ID NO: 88032 - DNA, 261 bp, Glycine max
  Clone ID: 700908348H1
cttttcttcaagcttggtttcggaaaaaaaaaaacttaaaagagacaaaaaaaaaaacccctagaagcgaagaagctgaaaaaaggctccaaagatggatttcaaaaactcttctcttctatgcctagctcttttccttgcatgctcttcggctattcgtgcatttggcatcacacaattgctaggtcaatatccagagttttccacattcaacaaatacctaaccgaaaccaagcttgcagaccaattaaacagccgcaa

SEQ ID NO: 88033 - DNA, 81 bp, Glycine max
  Clone ID: 700908349H1
ctcatgcattcttaattaatgagttgagcaatagcggtacccaaactaagtcactacattactaaagtagtactacattaa

SEQ ID NO: 88034 - DNA, 252 bp, Glycine max
  Clone ID: 700908350H1
atcttcctttcatttttcaataacgagagagagagagagaaacgtagttcagttcaattcaattcaccactgtcattcccaaatccgatcgcaacttcaattcttcttcatttttctctcttctctctctctgacaacaattattttgtggtgacaaactcactcaccggagtagcttcttcgcgtttcgttccgtctcccgaatccgttcgatttccttttgagggtttgaccgcgccgacgccgatgtct

SEQ ID NO: 88035 - DNA, 254 bp, Glycine max
  Clone ID: 700908352H1
aatgcgttgttgttgttgttgttgtatactattttgccaagagtcgcacagatcgaattgtttttaaactctttggcaaggatccatctgattttccccttcttatccgatcacagattctcaactggttatcccacagtcccacggagatcggagagctatataaggccaggttgtataatattgacgatatacctccgtcttgaaaaatctgcatgggaggagctctactgtaatctaggatcaagcttgag

SEQ ID NO: 88036 - DNA, 256 bp, Glycine max
  Clone ID: 700908353H1
ggctcgagccgattcggctcgagctgctttgccaccacctttgaaaagcaaccacccttttgctgctaactgcaatcgtcaacggcaaacagcacctacaaatttctagacacaaacttttttcgcggtcgcatgatttttcagaaaagaaaagctttaaagcccctcactcatgcaattaacgtggaaatatactgcaagtttacatttcagtttcctatcactgagatgtggagatatagtatgatgcaaagtc

SEQ ID NO: 88037 - DNA, 252 bp, Glycine max
  Clone ID: 700908355H1
cttgctttagccatcactaacactcagtctctgaattggggctgagggtttcgagtaacgtttatttttcacgagtttaagatatcatgggtaaagagaaggttcacattaacattgtggtcattggccatgttgactctgggaagtcaaccaccactggccacttgatttacaagcttggaggtattgacaagcgtgttattgagaggtttgagaaagaagctgctgagatgaacaagaggtcattcaaat

SEQ ID NO: 88038 - DNA, 252 bp, Glycine max
  Clone ID: 700908356H1
gtcgtcgcttccatgactttcctcagacaggtttggcttcacggaaaccagttcagtgggacaattccacagaacattcgaaacaaaacttccttgcaggagctcaacctcaatagcaatcaacttgttggtttgattccagattccttggcaaatatggaccttcagatactggtgtttaaataataacgggttcatgggtccaataccaaagtttaaggctgacaaagtatcttatgattctaatttatt

SEQ ID NO: 88039 - DNA, 253 bp, Glycine max
  Clone ID: 700908359H1
aaggcagacaaagatctcgatttcttgcagttgggtcatatgacaagaccatccgcatcttatcacttgatcctgatgattgtatgcaggctctaagtgtacaaagcgtttcttcagctccagagtctcttctttttcttgaagttcaagcatctgttggcggtgaggatggtgcagatcatcctgctagccttttcttgaacgccggcttacagaatggtgtcatgtttagaactgtggtggatatggttac

SEQ ID NO: 88040 - DNA, 256 bp, Glycine max
  Clone ID: 700908361H1
agagagcctgctgctccttcacaggctcctccagctgctgaggctgaacatgttcctgaggctccaaaggatgtggctgaggagaaatctgtaattccagtgccttcttctgatgacaaacctgatgagtccaaggctcttgtcttagttgagaagactcaagaagttgccgaagtgaaaccaactgagggctctgtcaaccgagatgcagtgcttgcaagagttgcaactgagaagagattgtcactaatcaaag

SEQ ID NO: 88041 - DNA, 257 bp, Glycine max
  Clone ID: 700908363H1
gcaaggacgataaggacaaagaagcaggtttagtaaattgtttggaacggattcatccaattgagggaaatgctgatatacagataagcaatcttcctaatgatgtggtaacaatttcaaccagtgcagaagacaatcttgagaccaggatggctaatcttaccagctacatagttgaatcttctactagtattagtggctcaaaagatgggtcaacaacatctgaatcaactatttgcagtgtgtgcaaggaggac

SEQ ID NO: 88042 - DNA, 259 bp, Glycine max
  Clone ID: 700908364H1
gttgtgtttccggcaataccacgacggaaggcccagatgccccacttggaaagggtaaaagctcattggcaaagaagcgcttattgtcatatcggggtttaagaggtttaacgatgacgaggataagcttcacaagttcatcaaaactcacgttgtcagactcttgaagatggacatgatcgctgttctcactggacttgagcgccaagaacaagtttctctcgctctcatgatgtgtaaggtgatgcaaaagcaagat

SEQ ID NO: 88043 - DNA, 248 bp, Glycine max
  Clone ID: 700908366H1
ccgattgatacacccttcttcgttcctcactcaccagccacggattctctcttctctattcagtaaacggctgttttgtatacgagctgtcccggtctcagcctctacatcccaaaacatcaaaacaactggttgggctccttgtatggcttcttcctcagttggtagaagagctacatattcaacacaatctgtatcgacaaatgagccagttgtatctgtagattggctttatgataacctgaagg

SEQ ID NO: 88044 - DNA, 249 bp, Glycine max
  Clone ID: 700908367H1
aaatccatctgcaattttaatggtgtctgaattctgaaacacaatttttattatgccattcagattgcgttagctaatgattcttttgttctgtttcattgtttgcttgttccttaaagatctcaaagggtccacaatcgcacaatttgtgaactgctcacgggataaaatggaatgcccttcaagttggatatccacaaacacatagatcttgtattctttgtagtatatttaataggacattgagtt

SEQ ID NO: 88045 - DNA, 250 bp, Glycine max
  Clone ID: 700908369H1
ctcttttgctgcatcagaggagttgtaaattaagagcatggctgcacaagctcttgtatcatcatcttctcttaccttctcagcggaggctgcaagacaaagtcttggaccaagatcactccaatctccatttggcttctccagaaaagcctcctttcttgttaaggcagctgctaccccccctgtcaagcaaggatcagacagacctttgtggtttgcatcaaagcaaagtctttcttacttggatggc

SEQ ID NO: 88046 - DNA, 250 bp, Glycine max
  Clone ID: 700908370H1
tgcacaatggtgcaggtttccgcaaggggttccttgggtccgttatcaggggacatacaaagatcttaatataagcttgatttggccgggaaaagatccaactttgggggttgatagtgtaggcacgatatcatctgctcttgtaacgtatgctgctattcaagcattacaaccagacttgatcatcaatgcaggcactgctggtggcttcaaggccaaaggagctagtattggtgatgttttcattgta

SEQ ID NO: 88047 - DNA, 249 bp, Glycine max
  Clone ID: 700908371H1
tggaaatatttggtccagaggcttctgggaaaacaactcttgctttgcatatgattgcggaagcacaaaagctaggaggctactgtgcctttgttgatgctgagcatgcacttgataagacacttgcagagtcaattggtgtagatactaagaacttgcttctctcacaacccgattgtggtgaacaagcacttagccttgtggataccttaatccggagtggttcagttgatgcaattgttgttgata

SEQ ID NO: 88048 - DNA, 252 bp, Glycine max
  Clone ID: 700908372H1
tatgtatgatattgtttagaatacttggtgtaaagattctttacaaatgtctttcaaacggaaagattatgtcaataagtttaatgtaacaactattacatgaaaactgggaccctaaataaaatattctacccattgaatttgtttaagtgttatgtatgtgatgcatttttttttacacatgtagatttttgatactggatcgcttgagggcttacatgcgtcatttcaagtgcgtaatgttcaagttta

SEQ ID NO: 88049 - DNA, 191 bp, Glycine max
  Clone ID: 700908375H1
ttcttcttcttcttcttcttcactctctttctctatctctgcgtggcagcatatatcaaatatcagttgcagtattaaagaggcttatccgtcagaatggtttccgcggagaaagattccaatgaaactcatcgaaccatcatcgggaagtccatgcgaacggtgcgctccaaaatattccacacaacata

SEQ ID NO: 88050 - DNA, 254 bp, Glycine max
  Clone ID: 700908377H1
aaaggattacgatgataagttgtcagagaaagaaacttttattgaacagcttaatgtggagcttgaagcttcaaagatggctgaatcttattcacgtagcctgctagaggagtggcataagaaggttgaggaactagaaatgaggattgaagaagcaaacaagctggagagatctgcatcagagtctttggaatctgtaatgaaacagcttgaaggaaacaatgatttgttgcaagaagcagaatctgaagttg

SEQ ID NO: 88051 - DNA, 255 bp, Glycine max
  unsure (1)..(255): unsure at all n locations
  Clone ID: 700908378H1
taaaatggcacttccatacccattttcctctcntcctcttctccttctaatactcttatcttctctcccaaacatttcccaagccacctctcgtgccccaaatcgcatgttagccttggttcaaaaccaaccgcttgtactaaaataccacaagggtcctcttctaaagggcaacatcaccctccatttgctatggtacggtacatttacccccacgcaacgatcatctgtcatcgatttccttgaatccctaac

SEQ ID NO: 88052 - DNA, 258 bp, Glycine max
  Clone ID: 700908379H1
cacgtctctctctcacatcatcatggcctccccaacactaataacccccaaatcagtgaaatcactcacacccatcaagcccaaacccaccaccaccatcgccgccactctcacaccacccacaacaacctccaccgccgccgccacccaccctcgccgccgcgaattcttgtccatcatcaccgccaccacatggctggtccctctgagcccggcactggcttcctcggacgaggaatacatgaaggagaccgagga

SEQ ID NO: 88053 - DNA, 253 bp, Glycine max
  unsure (1)..(253): unsure at all n locations
  Clone ID: 700908380H1
gataaggtgagcattcaccattttcttgtggtttggtttcctagagacactaagtactcccatggaacaaaacaacaaaagccttgtttcttctaaattcttatgtttatgtttgttgatcaccttgatcagcattattgttgctccacaagcggtatgggtgtgagcattnntcgtgtttggcgattcgcttgtagacaacgggaacaacaatttcttggccaccacggcgcgtgccgattcatatccttat

SEQ ID NO: 88054 - DNA, 238 bp, Glycine max
  Clone ID: 700908383H1
ggttcttgatttccttcttttctcttggtttgtgttgtcgttgagaagtcgcacataatcttcttccttctcgattttcctctccttcgacgatttttagggtttcgcttcgttcaccaacgcgcgtggtttctcttctcttcacgattttggggtcgaaatttggagtttagtttgccggcatgtccatgagtgagcgcaagactattgacctagatcaaggatgggattttatgca

SEQ ID NO: 88055 - DNA, 250 bp, Glycine max
  Clone ID: 700908384H1
aacttaagagatcaatatggccaccaccactacccagcctccctctaatatctgttttttccttctgttgttgcttctagcacactttcatttgggcataagccaacttgagctgaattactactctaaaagctgcccaaaagctgaagagatcatcaaggaacaagtcacacaactatataacaagcatggaaacactgccgtttcgtgggtcagaaatctcttccacgattgcgtggttaagtcatgc

SEQ ID NO: 88056 - DNA, 248 bp, Glycine max
  Clone ID: 700908385H1
cgtcacagtgatgaaaacatagcccctctgacgcacagaatgacgaagacaaaaagcggattcctttcctatataatataataatagacaatgagcaccgtgcaatcagcaaccaaaatgactcaagcccagattcaaccagttaaacttggaacccaaggctttgaggtttcaaaattgggattcggatgtatgggccttactggagcgtacaatgaccctctccaagaacaggatggcatatctgt

SEQ ID NO: 88057 - DNA, 248 bp, Glycine max
  Clone ID: 700908386H1
catggctcttctaggcttaatgagttttgctgccttgacccttttcttggtcctaacaactgtgcctcgtcaagcacacgcttcaagccgtggcaacttaggcagaaacatcaacccttcagtgtatggcatatgtgcctcttctgtcattgtgcatggatacaagtgtcaagaacacgaggttacaactgatgatggttacattctgagcctgcaaaggatcccagaaggtcgaggtaaaagcagtg

SEQ ID NO: 88058 - DNA, 249 bp, Glycine max
  Clone ID: 700908387H1
ctttctctctagacgttactttctctattctcaaagtcacacacagcactttctctctcatcttaactctctcccatgtttcctcagtttcatcgatcgagagtgaagccttaactctgcttattccgtgtcccagatctcgttgttgcttccgattctttgattcttcgcttctttcttcttctcacttcacattccgattcgtcgcagattcttttggtttctaaacatcatgatcgtcactgcctc

SEQ ID NO: 88059 - DNA, 250 bp, Glycine max
  Clone ID: 700908388H1
agaagcttgtctctgccaccaaggaagggctcaagcttgacgagagtgaagatgagaagaagaagcaagaagagttgatggagaagtttgacaacctctgcaaggtgatcaaggatgttttgggtgacaaggttgagaaggttgtggtctctgaccgcgttgtagattcaccatgctgtcttgtgactggcgaatacggttggaccgcaaacatggaaaggataatgaaggcccaagctctaagggacaa

SEQ ID NO: 88060 - DNA, 250 bp, Glycine max
  unsure (1)..(250): unsure at all n locations
  Clone ID: 700908390H1
ctcgagccgaatcggctcgagcagttccactcacttgaatgacgggganattgctgcctatcgcagcagaagccgattagagtcccatctcgttgaagataaagaagatgatggaggagaggttgacaatggagtagaatgcgaggaggaatctgctgaaagtgatctgcattctatagagttaaatatggacaacaacaagagttataagtggacctaccctcctgaaagcagatttgatacaagaaga

SEQ ID NO: 88061 - DNA, 249 bp, Glycine max
  Clone ID: 700908391H1
gttcttctttctactcacaacaacatctgaatcagaaacaacaatggccaacactaacttggaagatgttccctctctggatctcatgactgagctccttcgtcgtctcaagtgctcttccaaacctgacaagcgtcttattctcattggcccaccttgatctggaaaaggcacccagtcaccaatcataaaagatgagtactgcttatgccacttagctactggtgatatgttaagagcagctgtagc

SEQ ID NO: 88062 - DNA, 253 bp, Glycine max
  Clone ID: 700908394H1
gggaagtgattcacggaacctactctctaccctccagggttccttctttcacctctgcaatttctactccgccacgccctacgacattgttcgtcgtaaccctctcttcgttccacttaggaagagaaaagggtttgtttggatatggaaggtgacgagcacatgaacgaggttccatcagagaacagcaacttgggaagtgattctttggaaaaggagaacattttggaagatgaaaaggaggatttgcaag

SEQ ID NO: 88063 - DNA, 256 bp, Glycine max
  Clone ID: 700908402H1
tgagcagccaaacactctctctctgtctcgcgaaaattctcagttggcagactgtatccgagtcacctcgaggtaagcgtatgtctacgatcatctgctgtgtgacatcgaaggtaatcactacactcacgctgctatcatcggccaagacggcagcgtttggcgcccagagtaccgacttccctcagttcaaacctgaggagataactgccatcatgaatgactttaatgagcctggatcacttgctccaactgg

SEQ ID NO: 88064 - DNA, 265 bp, Glycine max
  Clone ID: 700908403H1
gttgtggttgatctcctcttaggctttccccaccgcagaatctcattctccaaaatggaggccagggtctcatcttctctcggcctcccttcccccaaaccccaccaattctcagtctcaaacctcaccgatttcccttctctcttcacacacacccccactctccccttcgcctccacctccaaatgggcccggcccaccccaaagcccaacccaaagcccctcctcaaaaccctctccgtcctcgaccgcgccctcatcggcg

SEQ ID NO: 88065 - DNA, 265 bp, Glycine max
  Clone ID: 700908404H1
cacctctgtagtgtagccaccaccaatcacaaatagccctcttggccttcaatttcgtccaattccaaatcatggctagcttttcagttttcacgtcttacattgttttgagtctagtgatggcactagcaattagcggtttcaatttcaaaggggcagaggcagcacgtgccttctttgtgtttggtgattctctcgttgacaatggcaacaacaactacttacccaccacagctagagttctcgctccaccttatggcattga

SEQ ID NO: 88066 - DNA, 264 bp, Glycine max
  Clone ID: 700908405H1
atgaattgcaatccaaattaccaatacctttaccaattaacattccaatatcaatccacttttcaaatcattttacggttgtgtttttggatgaatcaattatcataaataactcaataaattgcaagcataaaatgggaggacatgaattaatgttgcgtttttaagttctgaggaagaggaattggtgattgaagaaatggcagatgcagcgaagggtacctacagagcctcaagatggtcccttaacggaatgactgctct

SEQ ID NO: 88067 - DNA, 262 bp, Glycine max
  Clone ID: 700908407H1
ctcttgttcagtcaaggcaggttgaccgcagcaagaaaggccgggttcaagaagctcttaattattactctatagagtccacccttgcccttgtagtctcctttatcataaatatatttgtaacaacagtgtttgctaaggggttttatggttctgaacttgcaaacagcattggccttgtaaatgctggacagtatcttgaggagacatatgggggtggactatttccaattttatacatatggggtattggattattagc

SEQ ID NO: 88068 - DNA, 264 bp, Glycine max
  Clone ID: 700908408H1
aattgatcggtgtgtgcattaatttgtacaattgtgcaacagcctaacacatcccacgtggctcatacatttcctagattttcagcttgctattcccagcatcatgtgattaaacaggctctatggttttttaatatttggatccaccattcctctttttggtgtcatcattatcatcattgtaatctaaccaatactataatgctttgctttgttttgctacccctcttcctctcctgtcatagcctctccatcaaatgatca

SEQ ID NO: 88069 - DNA, 260 bp, Glycine max
  Clone ID: 700908410H1
gcttcttcaactggctccaacactatgatatcgaagattgtacgcatggttgaggatgctccatcacgtgaagcacctgtacaaaggcttgcagattcaatagcagggccatttgtatacagtgtaatgactttgtcagcagcaacatttgcattttggtattttgtaggatcacacatatttcctgatgttttgctcaacgatattgctggcccagaaggagatcctttgttgttgagtttaaaactatccgtagatgt

SEQ ID NO: 88070 - DNA, 254 bp, Glycine max
  Clone ID: 700908412H1
atttctacatccctggctctgttccgtcgatgacgatggcgtttagggtgcgaaaccctgacctccgctttctcattcttctctctctcttgtccatcacttccgccaaggtcttcttcgaggagcgtttcgatgacggatggggaaatcgttgggttaaatcagattggaaaaaagatgagaacctggctggggagtggaaccacacctctggccaatggaatggagacgctaacgacaaaggtattcaaacc

SEQ ID NO: 88071 - DNA, 253 bp, Glycine max
  Clone ID: 700908413H1
tgcatttgcagcacttgacgaagtggagagacaaatgaaatagttcaaattttagctttgagaattttcctagaatattaagcaggagagtttggtccaatttttattttggtttgcatttcctctcgtgaagttgttgtttattttttcttacaaattttagtgagaccaatgcagtaacaatagtctctgttaagttctaactggtaagggtcttgaagttgattttctaatttatttggtaaggtgatgt

SEQ ID NO: 88072 - DNA, 92 bp, Glycine max
  Clone ID: 700908414H1
gctgattatgatgcttgcagcatcaataaagcagtatataataataatgtaatagtgttaattgaaaagggattgctcttggcttcttgcac

SEQ ID NO: 88073 - DNA, 254 bp, Glycine max
  Clone ID: 700908416H1
tctgaaactaacaacaacaataaaagaccatgtcggtgaaggagtgcgagcaccacaaggggaagaagaggaagatcttccggcaagtgttctggtgcttagtggtgttccttttcatcgtgctggtcacaattcttttgatatgggcaatccttagacccaccaaacccaccttcacgctccaagacgtcaccgtctacgccttcaacgccaccgtggcgaacttcctcacttcgaatttttcggtcacgctc

SEQ ID NO: 88074 - DNA, 262 bp, Glycine max
  Clone ID: 700908417H1
ctttctttcagcttcttgttctacaatgaaaagcctctgccttgggccgtttcttgctgctagtgccccagttggtagaagagcctatggaggccacttaagcagaaagtgctttcaaaagcaacttcacttccactcacgttgtgttagtttctcttcattcatatgttctgcaactatatcagtgatgccagaattagaagagaagcaagtgtttgatggagagaaggctaatttgctagttaaagatctcagaaagagc

SEQ ID NO: 88075 - DNA, 261 bp, Glycine max
  Clone ID: 700908418H1
tccccccctagctacagagcagccaaaggggaggaataataataagcctatattctaaggccggaaaaataaaaaaggaataacaaaaatgtctggaaaggtaattatctcggctgtttctctcatcctggtggttggagtggccataggtgtggtggtggccgtcaacaagaagggcgaggatcccacacttcaatctcaacaaaaatcagtaggggttatctgccaaaacactgatgaccagaagctctgccacgaaac

SEQ ID NO: 88076 - DNA, 263 bp, Glycine max
  Clone ID: 700908419H1
agaagaagaagattgtgtctccgattattatttgaagatttctgaaacaccagagtgtttctgatcatcgtcgtcgctgatctctgtttcctccgttactgtttctgattgcagaggcgaaaaggttttccgcatcaaaatcgaattttgtttgctccatcatcaccatgggtagaatcacgaaactgggttttcttcttctacccagataagtaaaagggttttcttctttctcatttattccgacaagtgcacaaataaca

SEQ ID NO: 88077 - DNA, 262 bp, Glycine max
  Clone ID: 700908420H1
agagtttgtgtcttatttttatcaatttcatccgaattactagaattgcacccccattcttttgagtccaaattccatcaacttttgctggctaggttcgctcgaaattcttgaggccttcttaaacacgggattagttttatatatagcaatactatttatttataacgtctatttactcattgttttgaaagagatttttattcttccactatgtttttgggtgccccagaaaaaaattctgggtgctcctagtaacacc

SEQ ID NO: 88078 - DNA, 263 bp, Glycine max
  Clone ID: 700908421H1
agaatagctagtactagctcttgacccttcttcccacctttttctggtccctcctagaaatggcttccaattccattcttcttctttgtatctttcttgtggttgccacaaaggttttttcctatgatgaagatctcaagacagtggttcctgcacctgctccaccagtgaaggcaccaactcctgcctctccagtgaaatcaccatcttaccctccagggtcagtgaccacaccaactgttaaggtgccccctcctcctcag

SEQ ID NO: 88079 - DNA, 260 bp, Glycine max
  Clone ID: 700908422H1
atagattattatgtatcgattgaatcaatgactattcatgattccataattgaatcaattacatactggatccaagctaaaggaatgttatggtaaaacttcgtttgaaacgatgtggtaaaaagcaacgtgcgacttgaaagacatgattagattagctgtggattcttacatccgccattttttctagtatatagaaatgaacatgctcttgactcgacatcgtttgttctgttccactagaacttattgttttgggg

SEQ ID NO: 88080 - DNA, 261 bp, Glycine max
  Clone ID: 700908423H1
ttctacaacagagtgcagattgtaataacaaagtacactgtaaatagacactatcaatcaatgaatgaagaaactggaggaatgaatgatgtcctttatagattatacagcataacgggagattctaagcacctagtgttggctcacctttttgacaagccatgctttttagggttgcttgcagtgcaggctaatgacatagctgatttacatgctaatacacatatcccaattgttgttggatctcaaatgcggtatgaa

SEQ ID NO: 88081 - DNA, 259 bp, Glycine max
  Clone ID: 700908425H1
cttaaatttcaggcataaactgagagagagataacatcgttgcagtggcgcgcccaatggctctgggaatctctaacatactgcactgccccaaattgagtttctcccacaataattttctccccaaagttccaacctctatcagcctcaggtttccccagacagcagcatggagtgatagaaagattatctgtgctgctgcatctgcggcaggaagctctaatcccgatggtgaatttaatccttatgaggtgctagg

SEQ ID NO: 88082 - DNA, 255 bp, Glycine max
  Clone ID: 700908427H1
caaaaacctaaactcactcagtcctacgatacgattctcttccgcctcccttcccttcaactccacggcgcagatccgaggagtttgggaaaccctaattcattcctctttgcttcttctatctctattcctctaacaccagtgatggcaggtttggctccagaaggatcgcagtttgatgctcggcaatatgattctaagatgaatgaattgctttccgccgatggacaagaatttttcacttcatatgacgaa

SEQ ID NO: 88083 - DNA, 250 bp, Glycine max
  Clone ID: 700908430H1
cttagctgaaccctcacctcaatcttgcgtgctagctagctttattccaattcctacagaaccaaattattctgctagctagctagtacgtcaaataaaataaaataatcaaatatggcattcagcgggacccaacagaaatgcaaggcttgcgacaaaactgttcactttgtcgaaggtttatctgccgatggagctgcttatcacaagaactgcttcagatgcagccattgcaatggccttcttgcga

SEQ ID NO: 88084 - DNA, 252 bp, Glycine max
  Clone ID: 700908431H1
caccgattcattaacttcacacacagacacggtttttccaccacaccatagcatacaagtactagtagattaaacgccaaagaaataaattactcactttcacgtaaaccataacgtgcttccaccgcaaccaaccactatgggtgccgttaggtccataacggtgttgctactagtgttattcatggccatgagctccggcgtgcgctcgtgtccgccgtcggacagggcggcgctgctggcattcaaggc

SEQ ID NO: 88085 - DNA, 258 bp, Glycine max
  Clone ID: 700908433H1
ctcattctttcgggtgatttctttcttggggcggtagttgcatgtacactgacaaaacttgtcttaaggttggaagaggttcagacttcaaaagccgaagttaacaaggcaactacacaggccttgttgatcattgtctccatgctgcagctgggtcaatcttcaattcttccacatccaattgataatgattcttttgacaggattgtcctctgcattagattgttgtgcaataccggtgatgagataagaaaaata

SEQ ID NO: 88086 - DNA, 260 bp, Glycine max
  Clone ID: 700908436H1
aatggtttcttctaattgctactatcttgcattggtatgctgctgtgttctgctgctgctgaaccccaccgtgggggagcaggacgagcagaacttggtgctccagtaccacaaaggcgcgctcctcaaggggaggatcaccgttaacctgttatggtacggcagcatcaccccaatccaacgctccacaatcgttgacttcataaagtcgttaagctcctccccgggggccccacttccctcggtggcatggtggtgga

SEQ ID NO: 88087 - DNA, 259 bp, Glycine max
  Clone ID: 700908437H1
agacaattcaacttaagagatcaatatggccaccaccactacccagcctccctctaatatctgttttttccttctgttgttgcttctagcacactttcatttgggcataagccaacttgagctgaattactactctaaaagctgcccaaaagctgaagagatcatcaaggaacaagtcacacaactatataacaagcatggaaacactgccgtttcgtgggtcagaaatctcttccacgattgcgtggttaagtcatgc

SEQ ID NO: 88088 - DNA, 258 bp, Glycine max
  Clone ID: 700908439H1
gagagtagtgtgtggttgaaagttaagaagtagcaaagatgtttccattcgggcacaagggtcaaaagataaaggggactatggtggttatgcagaagaatgtgttggatatcaacagcatcaccagtgttgacgggatcgtcggcaccggcttagacttcttaggcagtgcactcgatacagttacttttttagcctcctccatctccatccaacttattagtgctaccaaggctgatggtgggaaaggaaaagttg

SEQ ID NO: 88089 - DNA, 258 bp, Glycine max
  Clone ID: 700908440H1
gttggcaacagattgaaaataaagcaaaggatgctactgaatgtttggtacaagaaggagcacagtttgctactaggttgactggtattaaagagaatactaaatttcaaaagaaattacagaacaatgagcagatgtcaggtctgaagcatctagtacatggagcaaagcagcatcacaatgtgaaaaatgtatatgtatggcatgcactagctggttattggggtggagtgaagccagcagcaaccggcatggaac

SEQ ID NO: 88090 - DNA, 257 bp, Glycine max
  Clone ID: 700908441H1
gaggagtagtactagtgataaggtgatcataatagagcataatataagagagtgaaaactcatggaggttggcctcaacaagaaggagaacatggggtttgaggaaactgagctaaggcttggactgcctggaaacgtaggaggcactggcactgaagaagtgctcatcaggaagagaggtttctctgagactgaaactgaaactgaggaggatgagtctgctaccactgtggatttgatgcttaatctttcttcta

SEQ ID NO: 88091 - DNA, 256 bp, Glycine max
  Clone ID: 700908442H1
gtaagcaactgcttaatttattgatcaaacgtacagctcctaattttcaagtatttttctttctcttcttgaagaattaagaagaaagtttttgtagttaatttttctccaaaggaaggaaaaggaagcaattatcaaggaggggactacggaaatagaaatggaaggaactcgtgcaaaagagggaaccctaccaccgggatttcgatttcaccctactgatgaagaacttgtcacttgctatctcgtaaataag

SEQ ID NO: 88092 - DNA, 254 bp, Glycine max
  Clone ID: 700908443H1
attcttccccctccacccacccagcatatctctctattcctatttattagcacccctcacattaccttgtgtcaccaactactttgactcctttaccataccattacaataattatcaaacctaaccagtaaaaatggtgaccgtggaggaaatccgcaacgctcagcgttcccatggacccgccaccatcttggccttcggcaccgccacgccgtccaactgcgtctcccaagccgattaccctgactactac

SEQ ID NO: 88093 - DNA, 250 bp, Glycine max
  Clone ID: 700908445H1
gttgtatccgtattcacaggtaattcttgacatgcttttcagatttcgattgctattgtaacatgatgacatttttcactttggactgagctcattttactggaagtttttcttggtctccgttcatgctattcataaagatcattatctagaaaaagatggcggctgagctagtcaatggtgcaacaagcgagaagctggctgaaactgattggacaaaaaatattgaaatttgtgagctagttgctca

SEQ ID NO: 88094 - DNA, 249 bp, Glycine max
  Clone ID: 700908447H1
gaaagatctaaaatcagacacagttcttattctccgttcgaacatattaccatcatttctccaaaaactggaaaaggatctggcagaaattcacaaaatagcttatgttgttgatgcatatgtctcttatgggagatccgatgatttgaatgaaaaagtcactattgcatcatcaggaagactagatgccattgcaagagcacggcctattctttccgcaatgtgtgaaaatctcttcacttttgaggg

SEQ ID NO: 88095 - DNA, 258 bp, Glycine max
  Clone ID: 700908449H1
attgggtgatggtaacaaaaatataactgtccaaaatgtgaactgtggacctggtcatggcattagtgttggaagccttgggaggtacgataatgaagaggccgttgaaggtcttctagttaagaattgcactttgaacaatagcgataacggtctgaggattaagacttggcctagcacgccattaacaattacagttactgatatgcattttgaagatattaccatggaaaatgtttcgaaccctgtgatcataga

SEQ ID NO: 88096 - DNA, 258 bp, Glycine max
  Clone ID: 700908451H1
cccagttcatccacatccaccccatgtcgcagaccctcatccaaagcctccagtgcatccccatccaccttatgtcccaaaaccaccagttgtgccagttacaccaccatatgttccaaaaccaccaattgtgaaccctccctatgtcccaaaaccgcctgttgtgccagttacaccaccttatatccctaaaccaccagttgtgacaccaccatatgtccctaaaccaccagtggtgccagttacaccaccatatgt

SEQ ID NO: 88097 - DNA, 257 bp, Glycine max
  Clone ID: 700908452H1
tcgatgaaactcgaatcttcagcgccatagcaagagagagaatagacatctatatcagcttcttgacgatgaatgcagaatccaatttctaaactcccgatgaattgtcttattcaaatgataacttcactttgaaggctcaagcatttcctagcaacatcagtgtcttttcccttgaatatgtagcaagtttgtctttatggagacatttgatttgactttgaagaagacaaaatagaggagaaaacaagtgaatg

SEQ ID NO: 88098 - DNA, 230 bp, Glycine max
  Clone ID: 700908453H1
atctccagttaatttttttatgtaatactcatcaaccttgacttttggatgatagtaaataatcatgtattgatattcgtttcttttgtcatatgattgttttaagatgcccggtggacctgtgtttgttctgtcctatcagatgccgtgctaatacggatattacatgtgttgtgtgttggcatgtttctagcatgccatttaaggaaatatgactcattgagtaacac

SEQ ID NO: 88099 - DNA, 257 bp, Glycine max
  Clone ID: 700908454H1
attggttggtagttgtctcaaaaatctcttcttgccctttggccataatcaaaagccaagacactgttcatacagctgctcaattatcaagccaaccttgctcggttccactgcagaatttcagtttattcttatctaggtagactccttataagtgcgcagaagttcaagtgtagagaatgagtcagcctaagattaaacgccgagttggtaaatacgaggtggggaggaccattggtgaaggtacatttgcaaag

SEQ ID NO: 88100 - DNA, 253 bp, Glycine max
  Clone ID: 700908455H1
agagcacagaatgggatgtaaaattattgaatcaatctgtttatgaccagacttctacaatagatatggctgaacattctggagaaaaagaagccgtcaacagcaatgaatcctgtggaactcccagcagtgtaattagcttaacagatgaatcaaactccagattgtcagaattacctcaaaagaatattaaggaacactgtagtcctacgaggagtggaatacttagtgctacaattgaggaaggagaaga

SEQ ID NO: 88101 - DNA, 255 bp, Glycine max
  Clone ID: 700908456H1
agcttttccctcgttgaaatgaaaatgggttcttctttgtggactttgtgtctaattttggcttcactagcctcttctgcattctgtgcctttccacggaggccagtggatgttccattcggcagaaactacgttcccacttgggcttttgatcacatcaaatacttcaatggaggttctgagattcaacttcatcttgacaagtacactggtactggcttccagtccaaagggtcatacttgtttggtcacttc

SEQ ID NO: 88102 - DNA, 254 bp, Glycine max
  Clone ID: 700908457H1
caacaacacccccccttccaacatgggcggtatctgccttgaggaaatcaaaaacgaaaacgtcgatctggaaaaaattccagtagaggaagtgtttgagtcgctgaaatgttcaacagcaggtctaacatcagacgaaggagccaacaggcttcaagtttttggaccaaacaaattggaagagaaaaaggagagcaaacttttgaagtttttgggtttcatgtggaaccccttatcatgggtcatggaagctg

SEQ ID NO: 88103 - DNA, 251 bp, Glycine max
  Clone ID: 700908458H1
ctgcactcgatcaaacacaaaatggaaaagaatgtggggattctcgccattgacatctacttccctcccgcttgcgttcagcaggaagcattggagactcatgatggtgccagtaaagggaagtataccattggacttggccaagactgcatgtcattctgtaccgaagtagaagatgtcatctcaatgagtttgacagtggttacttctcttcttgagaagtatgggattgatcctaaacaaatcggtcg

SEQ ID NO: 88104 - DNA, 247 bp, Glycine max
  Clone ID: 700908459H1
ctcaatttagattcaatgcattgtgtttaaattaaaaggtgggaagcggaacaaaaggggtttaggtcaaggttgtgacagggaagagaatcaatggaagacggtgagattgaagagggatcaattggcggtgtagaggaagaggagcaatctccagaaccgcacaagtcggaggagtctccctacgaaatgttgcgcaacagcaaggcttccgtggagagcatcgtcgccgatatgctctccatta

SEQ ID NO: 88105 - DNA, 241 bp, Glycine max
  Clone ID: 700908460H1
cttcccaataaagtatattctcttctctgccgtccaagctagtcgttctctctgtctcgtttatattttttggtttattatattcttctgtttgcacgaagcacactatgggttggaaaggaggtctcaaaaacgtggtcacaatgtttactttcatggtggccttggttgttgttcaacatgtgaagtgtggggactcagctcgcatgttacttcagcacggtggcttcgttcaacgaag

SEQ ID NO: 88106 - DNA, 247 bp, Glycine max
  Clone ID: 700908461H1
gtacatcttttggtttggggcgaaagttcagccttttcagatttgcatcaatttcaacagagaacaacgtgatttgtggattgctgtaaagtgcattatttggccattagctaatggacaagggggtgcctcctagcctcttcgtcaatgatggttctttcatggagaggttcaagcaacttcaacaagagcaggataaagggaagaatgtcaaattggaggattctaaaccaattaaggttatttc

SEQ ID NO: 88107 - DNA, 247 bp, Glycine max
  Clone ID: 700908462H1
attctccgtcgccacgacaacaatggctccaaagaaaggtgcgaaaggtggagttgtagcagcaaagaagaaggttcaggagaaggtaacgaaccctttgttcgagaagcgtccgaagcagttcgggatcggaggcgcgctgccgccgaagcgggacctgacgcgcttcgtgaagtggccgaagaacgtccaaatccaacgcaagaagcgcatcctcaagcagaggctcaaggtccctccggctctc

SEQ ID NO: 88108 - DNA, 208 bp, Glycine max
  Clone ID: 700908463H1
ggagactaccctctttcggccaccataatgtctgagtattctaataagatgactcgaggtgcctttatagctgcagtgtttgccatgcagggttttggaattttggcaggaggtgtgtttgctattatcatagcatctgtgttcaagtccaagtttgattctacaccatatacgaatcaaacgttgggttcgactgttccacacaaca

SEQ ID NO: 88109 - DNA, 226 bp, Glycine max
  Clone ID: 700908464H1
ccggtttatgcgttccttttttatgagtgtgtgcgtgagagagagagagagagagagagagagagagagagcgctatattcaattagcacccttatctttacaaataggtgaattcacgagtgttagaatgaaagatgattatgaatatgaggaagctatgctcatgctctgtacttcagtttagcttatgataaaacttgttcattcgtcagtttgtgttagtgg

SEQ ID NO: 88110 - DNA, 256 bp, Glycine max
  Clone ID: 700908465H1
gtaaggaacactcccctcaaccaaacagataatgaagtagcccaagggacccaacctgcaattggatctggaggccagtataaatattatttcaatattggaagtgttgagtcttttgaggagaagctagaggaagcgcaagaagctctgggcatttactctcatgattttgtgcctgtcacatattcttttgaactggggtaccgggaatggattacgttggcttcaatactgttgcttttgggatttctcgtgt

SEQ ID NO: 88111 - DNA, 253 bp, Glycine max
  Clone ID: 700908468H1
gaggtacttgctcacagatatatttttttttttgtctccatcattttctcgagagctttcagtttctgtggttcatctttcttcttcttaatctttccccccctctctgtaacatcccgcttctctgtatccctttctgctaatcatctgtctttcaagctaagattttctggtttgtcttttaattcaccaaaaagcaaacttagaaggatttttcgaaagccaggtgttttcagaaacgagatccaggttt

SEQ ID NO: 88112 - DNA, 121 bp, Glycine max
  Clone ID: 700908469H1
atgccaatacccatgtgcaacgaaattcaagcccaagcccaagcccaagcccaagcccaacctgggtttaagctcgtcggtttcaaaaacttcgtccgaaccaatcctaagtcggaccgct

SEQ ID NO: 88113 - DNA, 248 bp, Glycine max
  Clone ID: 700908475H1
cccaaattaccggggtggcattgttttctgggcagatttggttggggctaatcatatatttaccagcctaaaaaaatgggcacaattatatggtaacttctataaaccctcaaggtatttggaagaaagagcactcaaaggaattcctctgagtgcacctgcttcatctactccaaagtcaatggcgcgtctatgagaaagccaattgttcagcatgttggatgttctacaataaaaaaatgtaacaa

SEQ ID NO: 88114 - DNA, 246 bp, Glycine max
  Clone ID: 700908477H1
ttcaaatccaaatggccctttacattacactaataattggcctcctagtaaacaccctagtactctataaatagcatttgcatgcaccttagtcttcaccaaaatactcctcttggcatcttgtgttgtgtccctcttttaagctatttccttctcttaacacaattggttgtgccaattgccatagtcaccaaccaattaacaaaggtatatatatcatcatatcatcaccaaatgaaaaatatt

SEQ ID NO: 88115 - DNA, 245 bp, Glycine max
  Clone ID: 700908479H1
ctcgagccgcaagttttggattcgttcgacttcgactccaaaagacgaagacgacgtcgtcactctggtcaagtagtcactattcactctctattcggtcagaagcaatcctaattccttaatggagagttctgaagacgaaaatgatggagtctctggtaatcatgctactaaggaactgattcatttagcatctaatggggcaaaatttatagatgaagtactcaatggtcaaaatgaatgct

SEQ ID NO: 88116 - DNA, 245 bp, Glycine max
  Clone ID: 700908480H1
tctcaatgatgatgcaacttctcaatgctacagcaaaggcatttattgcacactttcagcttgacactcgctgatcatacttgcaagcaagcccccatccaatagcaatgccacctcaaatcaaccttttagcatctccaagtccttcactatttattttatttatgttctctttgctttgattgccttctggggtgtttctgtagtgttggaaatataaaggtggagtgtggactttaaaaggg

SEQ ID NO: 88117 - DNA, 247 bp, Glycine max
  Clone ID: 700908482H1
ctcaaagcttaaaagacacactgacagaagcaacctgtgctcccgtgtccttcaatcattgcatttgaacgatgatggtgagctgaagtggaacaacagggttgcaggacatggacactggtatggttgccgcagctcgttggattaagaagcactgcaccactatactacttgaagatctttgtcgacaccccgatttccacgtcaagctgcctccgtatcattggagttagcagaattcgggaag

SEQ ID NO: 88118 - DNA, 250 bp, Glycine max
  Clone ID: 700908485H1
atccgattcgggtcgggtttgtgttatcggaaccttcaccggaaaattctcagtcgacgtagcgaaaatggcggtatccctagcgacgaggctcgtgcggcggcgatcgccaccgcttctctggcggcgcacttttctatgtcggcagtggacgccgaaaaggaagtcgtggtcgtgccggagcttccaccgttcgattactccccgccgccatatgcgggccccaccgctgaggagattctggcgaacg

SEQ ID NO: 88119 - DNA, 251 bp, Glycine max
  Clone ID: 700908486H1
gaaacatcgtgtgcacagtaccccagaagatcgaacaaggatctccacgaagacaaacctctgttctcaactgtgtttctttacctctcacctactttcagaccataccaggctgagaagatgcagcagacaccgcctatgattcctatgatgccttcgttcccacctacgaacataaccaccgagcagattcaaaaataccttgatgagaacaagaagctgattctggcaatattggacaatcaaaatct

SEQ ID NO: 88120 - DNA, 252 bp, Glycine max
  Clone ID: 700908488H1
ctcataacacaaagcacaaagcaaagctcatccttgagttaaaaaatggcagcagcttcttccatggctctctcatccccatccttggctggcaaggccgtgaagctgggcccatcagccccagaagtgggaagggtgagcatgaggaagaccgtcaccaagcaggtctcctcaggaagcccatggtacggcccagaccgagtcaagtacttgggcccattctctggcgagcccccgtcctacctaaccggt

SEQ ID NO: 88121 - DNA, 246 bp, Glycine max
  Clone ID: 700908491H1
aaaaactcaatatcaaattctttgtcccacaaaagatggggttcactcccacaagtactgcaacatgctttcttcataatagcacctctggttgtgctatggtgttggaagctactaaagtgggtgtggctgaggccaaagagattggagagagcattaagggcacagggccttcaggggaatccctacagcctcttgattggggacactaaggaaatgtacacagtgctcatgcaagctgccaga

SEQ ID NO: 88122 - DNA, 245 bp, Glycine max
  Clone ID: 700908492H1
aatcaaaccaaccaccaacaagatgatttctgagtccctcttgttagtattcctcattgtcttcatttctgcttcccttctcaaactcttgtttgtgagagaaaacaaaccaaaggcccacttgaagaacccaccaagcccacctgcaatacccataataggtcatctccacctccttaaacccctcatccatcactcattccgagccctctctctccgatatgggcccctcctaagccttcgaa

SEQ ID NO: 88123 - DNA, 242 bp, Glycine max
  Clone ID: 700908493H1
atggaaggcccttaaactttctttctctctctctctctgcttcactttctcacttttgcattttcttgtgaaaaaaaaaatcctcagaaccaaaatcggttttcttctgtctctgatctctcaaagcttcaaattctccttgtttggtttgtttgtgtgtttggagtatgatgtcgccgccggcggtggtaacggaggaggaggggcggacaacgtgtcgtcgaccgtggcgtccggttctt

SEQ ID NO: 88124 - DNA, 242 bp, Glycine max
  Clone ID: 700908496H1
tcggtttatgcgttccttttttatgtgtgtgtgcgtgagagagagagagagagagagagagagagagagagcgctatattcaattagcacccttatctttacaaataggtgaattcacgagtgttagaatgaaagatgattatgaatatgaggaagctatgctcatgctctgtacttcagtttagcttatgataaaacttgttaatttgttagtttttgttagtgggaacgattgaatccgt

SEQ ID NO: 88125 - DNA, 263 bp, Glycine max
  Clone ID: 700908501H1
gagcttttctgtcatggctcatgcaatcaaagtgaagaatactttgatattcaatgcatttgttctctgtcaaatctttaatgaatttaatgctcgaaagccagatgaattcaacatattcaaaggcgtcatctactagtaatcacgtgttcctgcaatagaagctgcagagccaggggattgattgaaacagaagacaaattcgtcaaagcaacctcaaatgatcatcatgaaacagaacatgcacatgctcactctcacgt

SEQ ID NO: 88126 - DNA, 250 bp, Glycine max
  Clone ID: 700908506H1
aaaatcaagcgttacatgacaatgatggattcaatgacaaacgaagagttggatagttcaaaccccaagctcatgaatgagtcacgaatgatgcggatagctcgaggtgcaggtcgtcaaattagggaagtgatggagatgttggaagagtacaaacgtcttgcaaagatatggagcaaaatgaaagggcttaaaataccaaaaaaaggtgatatgagtgccctatcccgaaatatgaatgcccaacaca

SEQ ID NO: 88127 - DNA, 229 bp, Glycine max
  Clone ID: 700908508H1
tccacattgccttgacaaatggagagatgcaagagagtgtatttatgtggagccagatcaaagtaccgagagcaaaggtgacattttggtacaacaataagttgtgatgattaatgtagccgaggcttctttgaactttcccttgtgactgtttagtatcatggttgcttattgggaataattttgttgaaaaaaaaaacaaaacaaaaaagaaaaaaatataaagaaa

SEQ ID NO: 88128 - DNA, 78 bp, Glycine max
  Clone ID: 700908509H1
aaaaaatcgtttctcgttccccattctctactttctaccccaaaaccccaaccgcggcatcatcttcgacaccataaa

SEQ ID NO: 88129 - DNA, 241 bp, Glycine max
  Clone ID: 700908510H1
atatatcctccccctaaagcttcaacctttgggacgccctactttttttcttctatcttcattgatcatcacttctctttcttcattttccttttcggtgggaattaggataaccctcctcaatttttcaactctaaatttgatcatcaccttcacccactttactcttactaggaggaacccttctctctgtgtgtgtgttctgagttgattctgtgcttcagctttccacaaagtaaag

SEQ ID NO: 88130 - DNA, 238 bp, Glycine max
  Clone ID: 700908511H1
caaaaaaaaccccgtaagcttcgttttcacgatctttcgctccgtctggcatgtcatcagtgtgaattttcggtaaccctgggattacaacgtgcgtgttgaggtccttgagggacttggtgcaggtttcgtgaaagatggtttgataaagaagagcggcgagggtggaggcgccggaagtgtagtagaagtaagtggggatttgaagcgtgttggtgacacgtgcggcgctgtagtt

SEQ ID NO: 88131 - DNA, 234 bp, Glycine max
  Clone ID: 700908513H1
tagctgtgaagggttctccactgatggccttgctgctttagctgcaaattgcaggtttcttagggagctggatctgcaagaaaatgaggttgaagatcacaaaggccagtggctaagttgctttcctgacaactgcacatcacttgtttctcttaattttgcttgccttaaaggagaggttagtttgggagcactagagagacttgtggccagatctccttacctgaagagttt

SEQ ID NO: 88132 - DNA, 233 bp, Glycine max
  Clone ID: 700908514H1
gtttgccacttaggggaacaatcacagcatctggtgatcttgttcctttgtcctacattgctggtttgctaactggtagaccaaactccaaggctgttggaccctctggtgagattctgaatgccaaagaagcctttgaattggccaacatcggtgctgagttctttgagttgcaacctaaggaaggccttgcccttgtgaatggcactgctgttggttctggcttggcctca

SEQ ID NO: 88133 - DNA, 236 bp, Glycine max
  Clone ID: 700908515H1
cctctctctcatacacaaagaggccatgggttacttggacgatgatcatgatcatgacacattccacgaccacaacgacttcaacagaaggatactcatcatggctatagtttccttatcagtggtattggttcttgtctttacacttcacctctacgcaaggtttttcctcgcccgcagagccgccatataccaactcagcctcaacgtggcacagcacacgccgagccagacaa

SEQ ID NO: 88134 - DNA, 237 bp, Glycine max
  Clone ID: 700908516H1
ggcatcttgtgttgtgtccctcttttaagctatttccttctcttaacacaattggttgtgccaattgccatagtcaccaaccaattaacaaaggtatatatatcatcatatcatcaccaaatgaaaaatattgggttgttttttcttgtggtggtggctacttttgtggtggcagccacagctggtagctttgtaccaagactttgaaataacgtggggtggtgagcgtgccaaatc

SEQ ID NO: 88135 - DNA, 63 bp, Glycine max
  Clone ID: 700908517H1
gcgcaccttagcatggattcctcttcgtcctcttctctctcctctctcgcttcgtccacacaa

SEQ ID NO: 88136 - DNA, 256 bp, Glycine max
  Clone ID: 700908518H1
agcaaatggccaagctaattgccttttcaggaattttgaataacagggaaatgtttaatccagatttctacaactggaacagaatcaaggttaggtattgtgatggttcatcatttactggtgatgtggaagcagtgaatccagtgactaagttgcacttcagaggaggtaggattttcaatgctgtcatggaggatttactagcagtaggtgtggataatgaacgaaatgcgattatcgctggatgttcagctgg

SEQ ID NO: 88137 - DNA, 249 bp, Glycine max
  Clone ID: 700908520H1
cgttattctctctccgagcttcactctcttttcgcctctgctaaagggagaaaaatggggtactcctcctttctgggtcgtgttctctttgcctccctcttcatcctctccgcatggcagatgtttaatgaatttgatgccaatggtggacccatctcgaaagagttgattcccaaactcagtgtggtgaagaataatttatcctctaaattgggggtagcgctaccagatattgatgcccggcaattc

SEQ ID NO: 88138 - DNA, 246 bp, Glycine max
  Clone ID: 700908521H1
ccctctttctcattgtccggtgacatggagtccaagtttggtggagcccccgccagcatcatggcggcgaatttcgacgacttcaagtggatcgcctccatgttcgatcccggaaacgacgacgtcaagcccatctccgacgcagctttccaaaaccaggatgcagtaactgcattttcaacttgtggtggagtaacagatgatacccttgttcgttcccaaaacctcactcccattcaatccacc

SEQ ID NO: 88139 - DNA, 243 bp, Glycine max
  Clone ID: 700908522H1
tgccaacctgcacactcttcactcgatcatacagacaatggcaaagaatcgtggggatccttgccattgacatctacttccctcccgcttgcgttcagcaggaagcattggagtctcatgatggtgccagtaaagggatgtataccattggtcttggacaagattgcatgtcattctgtaccgaagtagaagatgtcatctcaatgagtttgacagtggttacttctcttcttgagaaatatg

SEQ ID NO: 88140 - DNA, 243 bp, Glycine max
  Clone ID: 700908523H1
ggaaggagtcgaggccggaattcaatcccttgcaggcggcggcacgccgaacgagttcgtcataatcgacgacggctggcagtcggtgggcggtgacgacaagaactcaaattcgttgcagaggctaactggaataaaagagaacgcgaagttccagaagaaggaggagccagaattagggattaagaacatcgtggagatagcgaagaagaagcattcggtgaaaaacgtgtacgtatggca

SEQ ID NO: 88141 - DNA, 240 bp, Glycine max
  Clone ID: 700908524H1
gctcgctcgtgttctgtttctctctgtttctccgttctctgtttttttttcagatctcgaaaaatgcagagcgcggctttcactttctctccctctctccctctccgcaacccttcccctaactcttggaggagaccctctctttctctccgtctccacgccaaacacagcatcaacaacaacaacagtaacagcaccgaagcgttaactccaatggcgtctcttccacttccttcactc

SEQ ID NO: 88142 - DNA, 237 bp, Glycine max
  Clone ID: 700908527H1
ccgtatcactccaagttataggtcacattgtcacaatgtggtcaccaattgttctactgttgtgccttattcctcctgtgttcttgctattcttcttccaataccgtagaaccttcaagaactcaaaccttccaccaggtcctagaggccttcccataatagggaatctccatcagctagatagctcgaatcttcatcttcagctatggaaactctcaaagaagtatggccctatat

SEQ ID NO: 88143 - DNA, 233 bp, Glycine max
  Clone ID: 700908528H1
aaaggatgctagtgggtgctgtcagagttcaacattttctgagttcactcactttttctcgcttccaaccttccttttctctgcgagcattttccgctatggccgaagaatttgtgaagggcactgttcatcaaaacggcgtcgctgtcatcaccctcgatcgccccaaagctctcaacgccatgaacctagatatggatgtaaagtataaaagttatcttgatgaatgggaa

SEQ ID NO: 88144 - DNA, 71 bp, Glycine max
  Clone ID: 700908529H1
ggtagagtaaatggcttacaatctttgctcttccccttcctctctcttcgatgacgttcgctccaggtctt

SEQ ID NO: 88145 - DNA, 235 bp, Glycine max
  Clone ID: 700908530H1
ctcaactattatgaatgctaaggatccatcgaagaatgtttttcaccttgttactgataaactaaattttggagccatgagcatgtggtttcttttaaacccgcctggaaaagctacaatccatgttgaaaacgttgatgattataagtggttgaactcatcctactgccctgtcttgcggcagcttgaatctgctacattgaaagagttttatttcaaggcaggccatccaaac

SEQ ID NO: 88146 - DNA, 233 bp, Glycine max
  Clone ID: 700908531H1
gaacttcatggccatggccatacttgtgatcactatgattgtgaacatctgcatacagtttgtcactggtgttatttatttgttctgggtggaacatgctgtcatcatgctcatcatgctaattttgttgatgaccatggcctcctcagccataagtcttccaaagatgaaacactactttgagctgaagtataagatgaatgaagaggcacttaaagagggttccaaaacta

SEQ ID NO: 88147 - DNA, 249 bp, Glycine max
  Clone ID: 700908532H1
acggtataccgttcaagatcgttcctcggtcactgcatacggtattatagagaaaacatttttctgcggcatgtacgcattggatatgtctgctgttgtttacaaggactgggttttcactgatcaagcactgcccaatgatcttgtcaagagaggagttgccgttaaggatccatctgctccccatggagttcggcttttgattgaggactatccttatgcttctgatgggctagagatatgggatgc

SEQ ID NO: 88148 - DNA, 192 bp, Glycine max
  Clone ID: 700908533H1
aaatctttaatgaatttaatgctcgaaagccagatgaattcaacatattcaaaggagtcacaagaaactacccctttatgggtatcattggattaacggttgtgcttcagattgtcatcattgaatttcttggcaagtttacatcaacagtgaggcttaattggaagcattggctcatctctgtcgttattg

SEQ ID NO: 88149 - DNA, 258 bp, Glycine max
  Clone ID: 700908534H1
catgaaagcttggacatactctgagtatggaaaatccaaggaagttctcaagtttaatcagagtgtggctttgcctgaggtgaaggaagaccaggtcctcatcaaggtcgctgctgcttcccttaaccccattgatcataagagaatggaaggctatttcaagaacagcgactcccctttacctactgctccgggttatgatgttgctggagtggtggttaaagtgggaagtgaagtgaagaaatttaaggttgggga

SEQ ID NO: 88150 - DNA, 249 bp, Glycine max
  Clone ID: 700908536H1
gaagatgaagatgttcgatggaaacaagcatgagttaacctgcattacatttggttttgatatagggtttggttcctctgtggctgatagctaattgaaattggtcatcgaaatctatgatcagaaacagatctatataaattacttgtacaaactgcaaagtacccttatgttaccagatcctgaattaagaatcagaaagatgtggggtattttctgggatttaaaacacaaactatgtgtttcttt

SEQ ID NO: 88151 - DNA, 248 bp, Glycine max
  Clone ID: 700908537H1
ttcttcccgtttcatctctcccatttcttcttttcttccgctctggttcagtaaagcgaagagggttaacgttattcataatggttgcaacagccgctacggcgtcgtttcttcccgtgcctttgccagacgctggaaaagggaaacccaagaaactgggtggtggtggcggtggcggtggcggttctgtgaacctcggaggactcaaacagaaacaaggtttgtgcggtggcttgcaggtcaaggca

SEQ ID NO: 88152 - DNA, 237 bp, Glycine max
  Clone ID: 700908541H1
atccctcctcagtcattcgtgtctgcagcgtataatgttccttccaagtctaccattctcccttctgccctgcatccattttcacaatcccaatccactaaatatattaaatctaaacaccatcacactcctagagtacacatgtaatagtggaaaccaaaacaaaggagaaaaaccagatattcatatagaacaaaggaggaacattctacttggcctaggagaggtttgtggtgc

SEQ ID NO: 88153 - DNA, 237 bp, Glycine max
  unsure (1)..(237): unsure at all n locations
  Clone ID: 700908542H1
ctttggaagaagaagaaaatggaggaggaacaaaacggcggtcgtttcgacctcataatcctgggcgcctcaggcttcacaggcaaatacgtcctccgcgaaccctcaaattcctcaacaccccatcctcccccctcatatccatagccatagcgggccgaagcccacaaaaactaacccatgcccttcagtgggcctccaggcccaaccctcccccctcnctccccatcctcaccg

SEQ ID NO: 88154 - DNA, 232 bp, Glycine max
  Clone ID: 700908544H1
tggaaatggaagaaggtgttggcgctatctttctcgactccaattcagagactgtcggacttggaggtacaaaagcaaagaaagtgaaagtgctgaagggagattccgttcctgttggaacggaagtgagagcgaacgtgggagcttcccagaacaaaattcttgctgacataagcaactttccccaacaaccaaagcaccacatctctgttgaccacttctcaaggaaaag

SEQ ID NO: 88155 - DNA, 235 bp, Glycine max
  Clone ID: 700908545H1
ctcttcttcctttctctctctcctcggtgtccttctttcccacttcccctcctccgcatgccccttcttcttcctcccttccccttctctggataaggaaagacggagcaaagcgtaagatcaggcaggatgagtaaaaaacaaagagagcaaaatcactttgtcctggtgcatggtataggccatggtgcctggtgttggtacaagcttaagccactgttggaatccgccggcc

SEQ ID NO: 88156 - DNA, 231 bp, Glycine max
  Clone ID: 700908546H1
acgatatctgcggtggctagaattagaaatgctcttgcgtatgctacacatacatttttcaacaaggaagggtttctatatcgtgcacacccccattgttaccacaagtgattgcgagggtgcgggtgagatgtttcaggtgaccactttgctgagtgaggcggagagattggagaaggagttgttgcagaatccacctccgtcggaagcggatgtggaggcggctagggt

SEQ ID NO: 88157 - DNA, 232 bp, Glycine max
  Clone ID: 700908547H1
gtccgaaccattgccatggatgccaccgaaggggtcgttagagggtggcgcgtcctcaacactggctcccctattatcgttccagttggtagggctacccttggccgtatcataaatgtcattggagagcctattgatgacaagggagaaatcaataccgagcattatttgcccattcatagagaagctcctgcttttgttgagcaagaaaccgcacagcagattcttgtta

SEQ ID NO: 88158 - DNA, 234 bp, Glycine max
  Clone ID: 700908548H1
ggcagctggcgttttacactggagatactgttgggggtcttttaaatgctacatttggaaatgcaacagaactgatcatctcaatatatgcactgaaaagtggaatgacacgcgttgtccagctctctttgctgggttcaattttgtccaatatgttactggtgcttgggtgtgcattcttatgtggtgggattgttaatcacgagaaggagcaagtgtttaactaggcagcta

SEQ ID NO: 88159 - DNA, 246 bp, Glycine max
  Clone ID: 700908551H1
atttcacagtactcaaaggtgaaagagcagtttcttgattatgaggaaggcaggtttctcttaaaatgcttctggtactgtgaaacactgctaaacgagcattcgcctaaagtattttcccagttgcataacagttccttgtgtcaatctatactttttaatttgcctatggtagacatatttgagtattttatgtgaattgcccaatctaaaatattggatgtctcaaaacaaatgccgtgatga

SEQ ID NO: 88160 - DNA, 240 bp, Glycine max
  Clone ID: 700908552H1
acacaacacaaaacgcaagtcaattggcgtcggcacgattcagagatttggttcgctgcctgaaacctaatggctccgaaggccaagccggcgccatcgcagcctgctcctcctcctgccctcgaagatctcttcaccacgctcaaccgccacatccaggcttccgcatacgccaatgcccgcaagctcacagatcagattctcgccattgctcccggcgacgaggacgcgtccgatgca

SEQ ID NO: 88161 - DNA, 245 bp, Glycine max
  Clone ID: 700908553H1
ggttatgtgctttaccagcattttgggtagggttattgtacgatgaagtttctctacaaagtgttttggatatgacagctgattggactccagaagaaagacaaatgctaaggaataaggttcctgtaactggtttgaagacaccattccgagacggtttgctgaagcatgttgctgaagatgttctaaagttggcaaaggatggcttggaaagaagaggcttcaaggaatcaggatttttgaat

SEQ ID NO: 88162 - DNA, 241 bp, Glycine max
  Clone ID: 700908554H1
atcacaaccattgctgcaggcttgtaaaaagcttgtagatttgtctgtttcacgaggctctttggatgatacaagtgtcatgctaatcaaattggagcactatatttaaagttaccttagtacgactaaggtttcaagattattgcagttgagatcgcattgaggtcaagattgcgttgcagtttgtgatttttgaacaaccttggtggtgcctgatgatggatagagagtagctgattct

SEQ ID NO: 88163 - DNA, 240 bp, Glycine max
  Clone ID: 700908555H1
gtcttttctctctctctctctctataataagattcttccctctcccttctctctctctctctagaacttcgtcctccctctgcttctttctttcttagttgcagcgcgattgctgcatcgtcctccaataagagctcgctgctagtgaaccctaacacggcggcaacgagaggtgttcggttgaagctcagatcagcgatggcagcagcaacccgcacttctctgcggttcctcctctca

SEQ ID NO: 88164 - DNA, 239 bp, Glycine max
  Clone ID: 700908556H1
gtctctgcgactaatagctacagcagttttcccaactccgaacttatcgaagaagatgactcgcggcataaaacaccgtcagaaagccaagagcaagaagaaggtctcgaagaaagagagtgggtcttcttcatctttggcgccagaaattcccgcgaaggtgtggcaaccgggtgtggataagttggaggaaggtgaagagcttcagtgtgatccttctgcttacaattctcttcatg

SEQ ID NO: 88165 - DNA, 233 bp, Glycine max
  Clone ID: 700908558H1
gcattctgctatttaattccactacgtacacgcacattctcctcaaagacaacaatggcaccaacagccaagactctgacttacctggcccaggagaaaaccctagaatcgagcttcgttcgggacgaggaggagcgtcccaaggttgcctacaacgaattcagcgacgagatcccagtgatttctcttgccggaatcgacgaggtggatggacgcagaagagagatttgtga

SEQ ID NO: 88166 - DNA, 237 bp, Glycine max
  Clone ID: 700908564H1
cgtgaagcagcgtcgtcgtcgtcgtcgcttccgggcggtgcgagattgaaggtcttcgtcgtgttctgtgcgatgtacggacacgtggaggggctggcaaaaaggttgaagaaaggcgtggacggtgtggagggtgtggaaggggttctgtatagggttccggagacattgccgattgaggtgctgaatcagatgagggcgccgcccaaggacgacgccataccggagattacggcg

SEQ ID NO: 88167 - DNA, 244 bp, Glycine max
  Clone ID: 700908569H1
gaagaagaagaagatggagaagtatcagatctggagcaggagaatagcgttggcagcgtttgcgtttgctctgctgttccaatcggcctcagcagacgacgtcgttgtgctctctgaagataacttcgagaaggaagttggtcaggacagaggagctctcgttgagttctatgctccttggtgtggacactgcaaaaagcttgctccagaatatgaaaagcttggtagcagcttcaagaaagcc

SEQ ID NO: 88168 - DNA, 237 bp, Glycine max
  Clone ID: 700908572H1
gccgcattcaaatttccgccaccgacgcattaaccccttccaagccccgacggttcccgagtggtgatggcggaaacgcacgaagacacaccgaaagaaaccgttcacaaagaagaagaagaagaggaccaaagcttcgaagagctcggcgtggacgctcgtctccttcgcgccctaatcaagaaaagaatcgagaaacctactccaattcagcgcgtcgcgattccactcattctg

SEQ ID NO: 88169 - DNA, 233 bp, Glycine max
  Clone ID: 700908573H1
ttgtgaatcagcaccacattcacctgagctttttgtacaggattccgaagcattgcttcccttgcagcatcctcggctgctgcttcccttggcatgtcagttatgctttgtaaccccatcaacctcagtggtgccacatggccagctccatctgcctctagccctgcctccttcaatactgttgctcttttctccaaaaagaatgctgcacctccaataaaagcttcactgct

SEQ ID NO: 88170 - DNA, 232 bp, Glycine max
  Clone ID: 700908574H1
ctaaacccccttcttccaaattcccaatttcttctgccgttcgatttcagactcttcattcgggatttgccatagcgattccttggttctcattcattcgttgcgtgctcgttcggctgttctcgtcgttccagtgaagagttccgtttcagtcatacgaccttgcatgagaattgatggcgccaatcctgcagagctctcagccatgggtcgagaaataccggccaaagca

SEQ ID NO: 88171 - DNA, 228 bp, Glycine max
  Clone ID: 700908578H1
cccgtgtctttttctgtgtatccaaggcatcttcaagctctgaatctgcaatggcttctctactcaacatggtttctgttccaccaagaatatcacctacctcacacaccagaatcgcttcgcttcaagctcgacccgttttgccacccttttctgtctcattttccaggaggagactatcaattagagcaacagaaactgataccaatgaagttcaatctcaggcac

SEQ ID NO: 88172 - DNA, 229 bp, Glycine max
  Clone ID: 700908580H1
gcaaatccttggtcaatgcagacggtattatagagaaaacatttttgtggggtaggtacgctttggaaatgtctgctgttgtttacaaggactgggttttcactgatcaagcactgcccaatgatcttgtcaagagaggagttgccgttaaggatccatctgcttcccatggagttcggcttatgattgaggctttccctataaggcgcaagtgtataactaggcagct

SEQ ID NO: 88173 - DNA, 239 bp, Glycine max
  Clone ID: 700908585H1
cttttacctagattttctctttgtattctgcaccagtttgtccactggttttccctgacacaaagcaagttgccaagggttgtgtggatgagatacgtaacaaaacagcatgctgtaatgctatggaaagctatgtgtctcacttgcaaaaacagagcttcatcacgaacttgcaagcgttggattgtgctgagactttggcaatgaaaatgaaaagatcgaatattactgcagatgtt

SEQ ID NO: 88174 - DNA, 235 bp, Glycine max
  Clone ID: 700908588H1
ttcttctccttgctttgaccttttgccggttgttgtgttgcattggtgcaaatggcgttcttcagaagcgtttctgcactttctcgacttcgctctcgcgtgggccagcaatctaatcttgcgaattcagttagatggctccaaactccgagctccattaacactgatctttattctgagttgaaggaactagttccagagtatcaggaacgtgttaagaagctgaagaaagatc

SEQ ID NO: 88175 - DNA, 160 bp, Glycine max
  Clone ID: 700908589H1
gtctcgtgtcaaatattaattttaggttcttcgttacgcgttgtgttgcgttgtgcgtgagaaagtgcgcgtggtgaaaaagcatggcttctcagctcctgagacgaaccttcggaagtcgtttccttgcaaaccctagggtcttctcctccgctgcttc

SEQ ID NO: 88176 - DNA, 226 bp, Glycine max
  Clone ID: 700908594H1
cacgatgcatggtttgctgatgaagaacgagtccgaaaagcagttggtttgttggagaagccaattgtctggcatcctaatactagagagcttacttgcggtatctgttttgaaaattatcctcgtgctaggattgaaatggcttcctgtgggcatccctattgtatctcatgttgggaaggctatatcagcacatccattaatgatggtcctggatgtttgatgt

SEQ ID NO: 88177 - DNA, 87 bp, Glycine max
  Clone ID: 700908595H1
tgaccctatatttggccatgcaagtcttgataattctaatgagctttggtcctctaaagatgtgagtaaaaatgcagcacctttacc

SEQ ID NO: 88178 - DNA, 203 bp, Glycine max
  Clone ID: 700908602H1
ctctgtgacatttgtgctgctagttcatatatttgcggctgacaccgacaaggaaagcaggaaaaaaacaaaaaggagcagatgggtagctcaggtttctcatggaaattggcggatcatccaaagcttccagagggtaagactgtggctgttgtggtattcgatggttggggagaggccacacccactgagtacaactgcat

SEQ ID NO: 88179 - DNA, 265 bp, Glycine max
  Clone ID: 700908603H1
cactcgagccgattcggctcgacaggtcccaaccaggaaaaatggttctgtcggatgccgctaattttgctcggaattacgcacttatggtcagacttcgtggccctgacccaaaagggttgaagatgagaaatcacgcttttcatcaataccgttctggtgaaacaaccctttcagcttcgggggtatttgtacctgatactctttgcgattctcaagtagctacgcgtcttaatggtgataactgtgaggatagggtattggt

SEQ ID NO: 88180 - DNA, 263 bp, Glycine max
  Clone ID: 700908604H1
ttgaattgaagagggttgggaaaagtagttatggtgtgccaagcagcgagtcaaacgagatttcgggcattgaaacatgaaaatggaatcgccgggagctccaccattatagttaaagttatagcatgttttcaacctctccgagaatgccaggctgactatttccgtcatttgctcaaacctgtgacgtaattgttttgccttgattcgtctgggtgggttaaaccggttcttttatttgttttccttgttcgtgaaacaaa

SEQ ID NO: 88181 - DNA, 256 bp, Glycine max
  Clone ID: 700908605H1
attgattgaaacctacaggtaggattctcatatgttatattactggagagtacagttactggctatcttcttcactgtagaggatggagatcaacttacctttaccccaaaagaccttgtttcttgggatgtgcccccactgactccatggaaggcatgcttcagttggtgaaatggagttctgaacttttcttgctaggaatatccaaatacagccctttcacttatgggatttcaagaattcctattccacaca

SEQ ID NO: 88182 - DNA, 262 bp, Glycine max
  Clone ID: 700908606H1
caaaatcaaattttgattttgccaaggttgctgctgtttctggcagtggccaacagcatggtagtgtgtattggaagaatggcagttctcagatattgtcatcattggatcctaagaagccattgttggatcagcttgaaaatgctttttccattaaggaatcctcaatttggatggacagtagcaccactgctgagtgtagggctatagagaaggcttttgggggagccttggagttggctcgtgtcacgggatcacgtgc

SEQ ID NO: 88183 - DNA, 260 bp, Glycine max
  Clone ID: 700908607H1
gattttcattttatcctcagttcttccaccctcgtcacctgcacttgattctttcttccaatcgataattgaagaacacaacatttcaattcctctctcgatttgttttgcaagttcgataatcgaaagtgcctggtgattcgatgttgtgtttacataggagttgtttgtgaaaatgagaaggcaggggcactatggggatccatctgccaacacttgtgttggtggtagccagatgcatcatatggctggtcaaaggg

SEQ ID NO: 88184 - DNA, 261 bp, Glycine max
  Clone ID: 700908608H1
ctggaagccgcggcaatacaaaggctgcgtttgctttgctcgctcgcgcactcacaaccacaacaaggcagcagtgacaagagaaagaaagagaagaagcgcttatcgaactcggacggaagcactgagttaactcagagcgagtgaaagtgttgctgcgtgatgtatggtggtatcgcccgtggacgcctcaccgaggagcgcaagtcgtggcggaagaaacatccccatggttttgttgcgaaccggagacgctgcccg

SEQ ID NO: 88185 - DNA, 257 bp, Glycine max
  Clone ID: 700908611H1
gaaaccaaaggtatctgtttgaacagtggtgaatgcttttaatgatgtgaatatacagaagcccctcaacatatcattgaactctccttccagtatactcatgattggaagtaactctgttaccgcagaccttcactaccctctgctgctaatagttcaacgccaaaatggtccagaccatcgctagagttcatcaaatgtaatctggatgcctcactctttcgcaattatcttcttcatggacttggggcatgcaa

SEQ ID NO: 88186 - DNA, 260 bp, Glycine max
  Clone ID: 700908612H1
aaggaagagaagtttaaggtagaggtacacaagaataaccaaggggggttccatctaaatcagatggaaccagatcattcctaattctgatctgaagtttggtcaccctagcaatattgttcttatctatgtctagtgcttacccctttctctgtgccttggcaaataagtagttttacaatgtgtgtatccctttattaactgggaagctaccggtgatgttacattagtaactttgtaacgtaaatattactttagta

SEQ ID NO: 88187 - DNA, 91 bp, Glycine max
  Clone ID: 700907862H1
ctcgtaactcgtaacggcttcataccggacctttgcttttctgtgtgtctctcaacttcaaagtgagaatctttcgttcactcactgggcc

SEQ ID NO: 88188 - DNA, 266 bp, Glycine max
  Clone ID: 700907864H1
gctcgaaattgtgccctccctctttctagctatttccctctcttaacacaattaacaaagatatatcatatcatatcaactccaaatgatgataaatattgggttgtttcttcttgtggtggtggctacttttgtggtggcagccacagctggtagcttttaccaagactttgaaataacatggggtggttagcgtgccaaaatctatgaaaatggaaatcttctcaccctctccctagacagagactctggctctggctttcgtt

SEQ ID NO: 88189 - DNA, 102 bp, Glycine max
  Clone ID: 700907866H1
caaggagggtttatttgggattgggttgatcaagccatggtgaaagtttatgaagatggtaccaagcattgggcatatggaggtgaatttggggatgttccc

SEQ ID NO: 88190 - DNA, 258 bp, Glycine max
  Clone ID: 700907867H1
gatcaacaaggtttactactcttgcttggtgaaggctatgcctaaatcgaatattccttcagagcctgagcggaatctggaccagatcatatataaaataaagcttcctggaccagcgattttgggtgagggtaagcccgaaaatcagaatcatgccataattttcacacgtggagagggcttgcaaacaatagatatgaaccaggataactacatggaagaagctttgaaaatgagaaatttgttgcaagaatttct

SEQ ID NO: 88191 - DNA, 255 bp, Glycine max
  Clone ID: 700907868H1
gttttcaacaatagaaggacatatgaaaatggcctatttccataatacctgctttctggtttttatgcttatcgcatcactgttggtccccggcaaaatacggtgactacggtcccgaagaagaaaaacttctatcaaaaactataggcattcaaggcattgtctattgcaaatctgcctctaaactcaccccacttgaaggggccttgacaaggatagcatgcgaggctgttgatgaatatgggtttgaaacga

SEQ ID NO: 88192 - DNA, 245 bp, Glycine max
  Clone ID: 700907870H1
atcttgtacaagctaggatcaatccagaagatgcgtatgctggtacttacactcattgtgaaatccacccatcactgattttcggtgtatgtgcttccatcataccatttccttatcacaatcagtccccacgtaatacttaataatccgcaatgggaaagcaagcaatgggaatatatgttaccaactaccagtttcgaatggataccttggcctatgttttatattatccacaaaagccactg

SEQ ID NO: 88193 - DNA, 248 bp, Glycine max
  Clone ID: 700907872H1
atcatcaattataagcatgggtttgtggaacacaacgaatgcagtgtcttgccgctttcacaagttttgtgatgacctaaagaatctggtcttccaaggtgatgccacgtcttcttccaggggcatagaactcacaaagttagacggtggaggaaaaccagtgggtggcagtgtggggagagtgttatactcttctccagtgcacctttgggaaagctctacagtggtcgcaagctttgaaaccgact

SEQ ID NO: 88194 - DNA, 265 bp, Glycine max
  Clone ID: 700907880H1
tgcttagaagtttctttttcttttttgggaaagtggtcaccctgaagctgtttacccttgcaccctaaggtcacaataacgagctcccaattgttgacacaaatagtggtgctacaacagcgagacatatatctgtcacatactaatctcactttataaatgtgtcactgtgctttccatgtatgccaactacggagggacaatacaataagtttgtactgcagtcattaactagcttgctgcttcaatttgttatattgtgtag

SEQ ID NO: 88195 - DNA, 97 bp, Glycine max
  Clone ID: 700907882H1
tctgcttctgcttgtgtgtgattcagaattggcaagatcagatctggtctcagagatggagaagtcgtgcactctggtggtccacttcgacaagggc

SEQ ID NO: 88196 - DNA, 162 bp, Glycine max
  Clone ID: 700907883H1
aacttgatttgtaatattggagtagggaattaagtatatataaatgcggacaaaggtaataaaatcattgaatgtagctattagatcataactacatatatgtatatataccttgtatgtgtgaaatgacaaattattatttaattataagtttttttttgt

SEQ ID NO: 88197 - DNA, 254 bp, Glycine max
  Clone ID: 700907889H1
ttcgaattcggctgcgccctaacagaattcatttcaattccaactcctctgctcaaaatcctaggctcgttcttgaatccctaattcgatctcctcctcctcctccgaagaataacaggaggatcgatgtgggcagcacttgcctggcgtcgtgctgcgcggcctgcgcatgcgacgcctgcaggaacgtcgtttcgggaatcagccgtcgttccgaccggatcgcctactgcggcctcttcgccttctccctt

SEQ ID NO: 88198 - DNA, 252 bp, Glycine max
  Clone ID: 700907890H1
ctttccaacagcatttgcaacattcagacataaataacataactttcctgcgaaggaagttttatgtcattacattatcacaactcttttgtttctctggcatgcaactaaaaaactctgctgctgtagctctggcttgcaactaaaaaactagactgctgtagcaaagcctcagttctatggcttcctagttgcccatttgagaaaaaaaaaaccacaaagatcttgaatttggctgattctggaaatggg

SEQ ID NO: 88199 - DNA, 96 bp, Glycine max
  Clone ID: 700907891H1
cacgaaatcgcgaacagaacagcaacgttaacaatgggttctcgctacgaggtggaactgaagctctcatcggcacgcgctctcaagaacgtgaac

SEQ ID NO: 88200 - DNA, 262 bp, Glycine max
  unsure (1)..(262): unsure at all n locations
  Clone ID: 700907892H1
caaagatcccaacagtgagaagtcgagcgattttgtttaccttccaagagatgaagcatttggtcacttgaagtcatcagattttctcgcttttggaatcaaatctggacnccaagatgtcttgcctgtcttgactgatgcattcgatggaaatattttgagccttgagtttgataattttgctgaagtgcgcgaactctatgaaggtggagttacactacctacgaactttcttagcaagatcgcccctataccagtgatc

SEQ ID NO: 88201 - DNA, 264 bp, Glycine max
  Clone ID: 700907893H1
caccaacagccaagactctgacttacctggcccaggagactaccctagaatcgagcttcgttcgggacgaggaggtgcgtcccaaggttgcctacaacgaattcagcgacgagatcccagtgatttctcttgccggaatcgacgaggtggatggacgcagaagagagatttgtgagaagatcgtggaggcttgcgagaattggggtatattccaggttgttgatcacggtgtggatcaacaactcgtggccgagatgacccgtc

SEQ ID NO: 88202 - DNA, 267 bp, Glycine max
  Clone ID: 700907894H1
gaactcatcacttactggaagccttgttgtgagtaagagaaaaggcttcctgcaccgagcacaccaacttgatacctctgattctttctttgcttagaattccacagaatatggagactatacttttcaatcactccccacctttggaattcaagggtttgagcaaggaggaggaagactcattgctagggcaagtggaaatatggaggtacatgacatgcttcacggactccgtggccttgaaagctgtcatagagcttcgtatag

SEQ ID NO: 88203 - DNA, 265 bp, Glycine max
  Clone ID: 700907895H1
gccaccaccaatcacaaatagccctcttggccttcaatttcgtccaattccaaatcatggctagctcttcagttttcacgtcttacattgttttgagtctagtgatggcactagcaattagcggtttcaatttcaaaggggcagaggcagcacgtgccttctttgtgtttggtgattctctcgttgacaatggcaacaacaactacttagccaccacagctagagcatacgctccaccttatggcattgattatccaactcgcag

SEQ ID NO: 88204 - DNA, 256 bp, Glycine max
  Clone ID: 700907896H1
attgtgccctccctctttctagctatttccctctcttaacacaattaacaaagatatatcatatcatatcaactccaaatgatgaaaaatattgggttgtttcttcttgtggtggtggctacttttgtggtggcagccacagctggtagcttttaccaagactttgaaataacatggggtggtgagcgtgccaaaatctatgaaaatggaaatcttctcaccctctccctagacagagctctggctctggctttcg

SEQ ID NO: 88205 - DNA, 211 bp, Glycine max
  Clone ID: 700907901H1
gagaaaaattacaacaacattattatttattgtaactaattagctaattaattggttattaaaaattataaggccatgtttggcgaaaccgttccgcgaccacagttcattcaatctgagcctataatgtcgacgacggatgcgctcaccgacgacgagttcacgatgcaaagcagtagcacggcgtcaccgatgatcccacacaacatac

SEQ ID NO: 88206 - DNA, 168 bp, Glycine max
  Clone ID: 700907902H1
atcaatgtatgataacaacctcagaatcaagttatcagtgtgtcaccctgacttttcaaaaacaattatttgttgcttcatattccactgtgatttcataatagattttcactcatcttacttgactccaagcattctatatatctagtgcctccacgcatctctacc

SEQ ID NO: 88207 - DNA, 262 bp, Glycine max
  Clone ID: 700907903H1
ggttgacttagttaatagtagtttagatgatttatatttgatatcttgcacttgttgcataccgttgtgccaaaataggaaaggaaagctatcaagtaactcccagttttgctccccagtgttttctaatagttgtgaaggaggttgtgaaattcgtcatccgggtcaggtgcaaatttaccatgctagctagatagtgagagagagagagataaaatgtttgatgtcattttgtgtacaaagtccataagctgttagagac

SEQ ID NO: 88208 - DNA, 262 bp, Glycine max
  Clone ID: 700907904H1
ggaagagaagaattaacatgaaaattcagtgtgacgtgtgtgagagagctccagcaacagtgatttgttgcgcggatgaggctgctttgtgtgccaaatgtgacgttgaagttcatgctgcaaacaagcttgcaagcaagcaccaaagacttcttcttcaatgtctatcaagcaagcttcccacatgtgacatttgccaagacaagccagcattcatattttgtgttgaagacagagcactcttctgtcagattgtgatgaa

SEQ ID NO: 88209 - DNA, 263 bp, Glycine max
  Clone ID: 700907905H1
agaataaccatgatgaaatcgactttgagtttttggggaacattagaggcaaagactggaggattcagaccaatgtttatggcaatggtagcaccaacattggcagagaggaaagatatggtctctggtttgaccctgcagatgatttccatcagtacactattgtctggacagactctcagatcatattttatgtggacaatgttcctattagagaagtgacgcgaacagaatctatgggaggagatttccttctaagccaa

SEQ ID NO: 88210 - DNA, 260 bp, Glycine max
  Clone ID: 700907907H1
acgtaacgtgctaacttcccttctctttggaaagaaatctcaaaactctacaaacaaaggcaccaataagctttcttctgttggtgttgtggaggaattatttgaagagggttctgcaatgcttacagagaggttaggcaaggattttccatctaatacgaatcctgagattttccgctgtgcggtttgccaagcagatcagccctctgtggacagtttatcaatgaacactgggccttttttcccccagtatctaagcc

SEQ ID NO: 88211 - DNA, 260 bp, Glycine max
  Clone ID: 700907908H1
gaaagggccattttctgaatgcgctctatctatctcttccgatctggctactaaccctaacccgcttcgaaccgtggcttcctcggcctcgcagaacctctctcgaagaaaatcttcttcttcgtcttcgttttctcaacaaacttccgggtcgacccggatcgtttaccgcgaacctcggatcccatcggaatccaattttccgatctggcagcagaactggttcatcgcattgctcttcctcatggtctcggattctt

SEQ ID NO: 88212 - DNA, 184 bp, Glycine max
  Clone ID: 700907909H1
caaacttgtagaagccatggagaggagtataccagtggttagggaggcttggttgattgacagtattgaaaagcaagaaccacaacctttggaagcttatgatcttgtctgcggatcgttctgtggatggcaagggtatcccctgggacaaacaagatcctggggaagaggctatcgaatcact

SEQ ID NO: 88213 - DNA, 86 bp, Glycine max
  Clone ID: 700907911H1
tgctcctcgaacccttgagagcgagaaagcacgtttctctcttgaggttaattattagtatgattgagtattgagcatggaggcgc

SEQ ID NO: 88214 - DNA, 253 bp, Glycine max
  Clone ID: 700907912H1
tcgttctttcactcaaacacacacccttgattatatcactttctcttgttctcttaccgtagaacattgcatttactcctatctctcactctggatcttcaacttcttcctgattttgctgatttgggggattgagttggaaggggaaacatggctgcttcttctgcatctctttctggtgcttctgcttcggatcttctgaggagttcaaccagcggtttcaatggtgttcctttgagaccatggggaaggg

SEQ ID NO: 88215 - DNA, 255 bp, Glycine max
  Clone ID: 700907913H1
gtgaccaacaatcaagcattgacccccgcacttttaaagtacgaggaccaaattatttaaaggccaagaagaaagaatttgcttcaaaccatgctgcatattacccatttggtgttgatgtattcttatcgccacagaaaatagaccatcatagctcggtttgtggaacttcctgtgatgagctcttcagggaaacttccacccatactagtagtgaatgttcagattcctatttaccctgccacactttttcaa

SEQ ID NO: 88216 - DNA, 254 bp, Glycine max
  Clone ID: 700907914H1
gagggtctccttcttgccagtaatagtcttcaaaaggtttggaaagaagcttcaagagactgaacaaaagcttatacagaagaacaaggacgagacgttgagaaaccgcagtgggccggctaaaatgccttacactttgctctatccttctagtgaggagggattgactttcagaggaattcccaacagtatctccatctaggggctctatggttgttgcagtactttccctggttttcaataaagtgaataga

SEQ ID NO: 88217 - DNA, 254 bp, Glycine max
  Clone ID: 700907915H1
ctttaagtttccttaaggtccatgatgcgggtcacatggttccgatggatcagccgaaggattcgttagaaatgctgaagaggtggactcagggaaccctttcagaatctgcagctgatgcggagaaattggttgcggagttgtaatcactttcgttattgcaattagtccagaaaagggatacaaaagtattatgcaataaagagaagggaattaaagtgatcagcatgtgttattaattaaaagtgagattg

SEQ ID NO: 88218 - DNA, 264 bp, Glycine max
  Clone ID: 700907917H1
tgctaattgcttcgaccgagtgattcagaggaggagaagtaatggctgcgatcgcgggaggcacgtgtttggtgttgtgagttttaagctcaagcaagctgaaatgccctttgcatgttccagcttaatccgcaagcatatcggagattctcctcagcgcaatgtggctctaagacgcagagcaaatggaacaattcttccccaaatcagagcccagaacgttcttccagactatgttccaaaatcggagtttataaagtagaa

SEQ ID NO: 88219 - DNA, 259 bp, Glycine max
  Clone ID: 700907918H1
gtatttctggggaacagttgctggacttagagatgctgctttttttgttgctacggggaacagttgctgaacaaataattacggtttgtatgtctgatgctggttcacacctaagtttgaagatgggatagcaaaaactagtggcaaacgagtgaagattggatttggttttggttctttctgattaattttggttttaacttgggaaatggtttctgaaaatgtggatagaaagctcgcagcccccattattgaagaa

SEQ ID NO: 88220 - DNA, 260 bp, Glycine max
  Clone ID: 700907921H1
ggaaaagcagctgccaaataaagggtaatgaacaaggaagtgaagctcccaaaattaaaccaatgcgtttcactcttgctgtctaacatgcactttcccgattgctagagtttctgttttagtttgtcagtaattaataggtgttctactttcagggcagtgctctgaggtaatgctgttcgattttacttctcagtctactacagtgtgtatttggtaccaaacttttatgctaaaataatccaaggcgtgtgttttgg

SEQ ID NO: 88221 - DNA, 259 bp, Glycine max
  Clone ID: 700907922H1
ctaacttttcccgagaaaattttagtttccattttcatttctccctcagattcccggaaaatatattcacaacattaatttcgcacttcgccctctgccaactaccaagctacggcttcctctgccaattcaatccgtcgtcgttttcgccaattccgaatgcgtcgatttcgggttggagaatgagttctccgacctcttcttggatctctgttcaaaccgtcacacagtctctgcgttcggatttcttgtccaattt

SEQ ID NO: 88222 - DNA, 250 bp, Glycine max
  Clone ID: 700907926H1
gaaaatgagtccaaaaataacacctatagatacggagcaagatcttatgaatttaatgggagctatttttgctgctgttttctttcttggaggctccaacacttccactgttcaacccatagttgcaattgaaagaacagtcttctaccgtgaaagagcagctggaatgtactcagctctaccttatgcaattgctcaggtggcaatagaatgtatttatgttgcaatccagacatttacttcagtctta

SEQ ID NO: 88223 - DNA, 250 bp, Glycine max
  Clone ID: 700907927H1
ggtggatttcccagtggaaaatacctctttgctggagtggttaatggaaggaacatctataccaatgaccttgctgcttctctcactacattgcagggtcttgagggcattgtaggcaaagataagcttgttgtgtccacctcctcctcccttcttcacactgctgttgatcttgttaacgagaccaagttggatgacgagatcaagtcatggctagcatttgctgcacaaaaaattgtgaagttaacgc

SEQ ID NO: 88224 - DNA, 67 bp, Glycine max
  Clone ID: 700907930H1
ataaaagggaggccaatgcattatatagtaattatacgtgggaatgttgctccagcaaaatcacccc

SEQ ID NO: 88225 - DNA, 122 bp, Glycine max
  Clone ID: 700907932H1
gcagctcaagctcgttgctggcaactctgctggcactgtcactgcttactacttgtcatcccaagggccaacacatgatgagattgatttcgagtttttgggaaacctaagtggggaccctt

SEQ ID NO: 88226 - DNA, 262 bp, Glycine max
  Clone ID: 700907933H1
ctcataacacaaagcacaaagcaaagctcatccttgagttaaaaaatggcagcagcttcttccatggctctctcatccccatccttggctggcaaggccgtgaagctgggcccatcagccccagaagtgggaagggtgagcatgaggaagaccgtcaccaagcaggtctcctcaggaagcccatggtacggcccagaccgagtcaagtactcgggcccattctctggcgagcccccgtcctacctaaccgggagttcccagg

SEQ ID NO: 88227 - DNA, 257 bp, Glycine max
  Clone ID: 700907934H1
cacagatcagaagtgttcaagtttggattttgtgcttctggaagttaaaatggcccaagaaactttcctattcacatctaaatcagtgaacgaggggcaccctgacaagctctgtgaccagatctccgatgctgtgctcgatgcatgcttggagcaggaccctgacagcaaggttgcctgtgaaacctgcattgagaccaacatggtgatggttttcggagagatcacaaccaaggccaacgtggactatgagaaga

SEQ ID NO: 88228 - DNA, 260 bp, Glycine max
  Clone ID: 700907937H1
ggaagagcagtggcagcagcatgtggcgccagaggaggtttctgtggagcattttcctgcagagagttctccagatgttatcaatgaaggaagtgccacgtcgtcaacaccagtgactgaagatagaaaccatgccgttgcctttgcagcagcaactgccgctgccgccgaggcggcggtgcgcagctgctcaagcagctagctagagttgtaagattggcgggttatggacgccagccgaaggaagaagagctgcaata

SEQ ID NO: 88229 - DNA, 249 bp, Glycine max
  Clone ID: 700907939H1
cgttacttaattccttcgttcatcacttctactttctttcttttcctctcgcaagtcttagtgcttggcgattgattaccccagaaggactttgtttgttacaagaaaccaagggcaagtttcatgtctgaattcgacacaaacatcccaactgcttttgatccctttgctgatgcaaatgctgaggactcaggtgctgggacgaaagagtatgttcatgttcgtgtacaacagcgcacggaaggaaaa

SEQ ID NO: 88230 - DNA, 254 bp, Glycine max
  Clone ID: 700907940H1
ggaatgtatgattccctgaagccagtagttttggttggtgggttgcaggatagtttctttgctagtttccttttcggatggggaatcacaattggtgctggtttggcttcttaccccattgacactgttcgtagaaggatgatgatgacttctggagaggctgtgaagtacaagagctctttgcatgcattccaaacaatcgtcgcaaatgagggtgccaagtcactcttcaaaggtgctgggcaaacatattg

SEQ ID NO: 88231 - DNA, 251 bp, Glycine max
  Clone ID: 700907942H1
cttcatttccccttcagccgcagagatcaaaaccctcaccataacctccgacacccgccccatgatcctcttggagaaattcggcttcacccacaccggccacgtgtcgatctctgtctcctccgtcttcgtggtggcctcaggtgggtcccaacccgatccctcccgattagggttctttctcctgagcgaagagtccctcctgcaagtcctgatcgagatccagcaaaaccctagctctgcgtcctcga

SEQ ID NO: 88232 - DNA, 249 bp, Glycine max
  Clone ID: 700907943H1
gcaagatggaagtgcttcccacttcttccatagagcaatcaccgattacaacaccgaaacccgaaagcgccgaaaaatactagggcaagattttggtgatgtccgctggcacaagactggaagaactaaaccagttgtctttaatgggattcaaaaaggctgtaaaaagattatggttttgtatgttagcaatgtaaggggaggaagagctgagaaaactaattgggttatgcatcatatcacctagga

SEQ ID NO: 88233 - DNA, 248 bp, Glycine max
  Clone ID: 700907945H1
gcgagagagagaaagaaatggcgaccaacattgggatcatggatgcggcttacttcgtcggcagatctgagattctttcttggatcaactcaactctgcaactcaatctctccaaagtcgaagaggcttgttcaggcgccgttcattgtcagcttctcgatgccgctcatccagggatcgtgcctatgcacaaggtcaatttcgacgccaagagcgagtacgagatgattcagaacacaaggtccttc

SEQ ID NO: 88234 - DNA, 249 bp, Glycine max
  Clone ID: 700907948H1
gattgagcaggctgcctacgtcaaatccatcgacaacaatcatatgttagaaataggactcgaagggttctatggtgaaacaatgccagagaaaaaacaattcaatcctgggtaccaacttattggcactgatttcatttctaacaacctagttcaccaagttgattttgctaccatgcatctctaccctgaacaatggttgccaggctcaaacgaagctgctcagggtgcatttgttacaaatggtta

SEQ ID NO: 88235 - DNA, 259 bp, Glycine max
  Clone ID: 700907949H1
gaaaaaaaacacacacacacaaacacaagcacagttgaaaatggctctgcttaccctctcttcgctgcaatgaagaaacgtttgtttttcttctccgaagaagaaaaatggctctcggcgacgatgcgcagaccactctccctcgttcctcgatgcccttctctgcgaagagcgagaaaccttcgaggaagactttgatgagaacggttatgagcgtgagaccgaaaacaacgaaccctctgtgataagtcgcaatctt

SEQ ID NO: 88236 - DNA, 253 bp, Glycine max
  Clone ID: 700907951H1
gcgcttcttctctggtctctggcttccttggtacgggaagaactcaatcttgtccatttccctttggtttttctctcttcgatctcttcaccttccattcgaccaccctcttatcacagctcgcgttaacttaagccctctccgttgagggtttctccaggtgtggtttgattttcagtttctgatgctgaagaaataaaaaagcttgaaggctttgctcttctgtgtgaaaaatgttggaagtggtgcgaaa

SEQ ID NO: 88237 - DNA, 253 bp, Glycine max
  Clone ID: 700907953H1
cttgctgaggccattgatgatggcaagagtggaccaagggatgaccccaaggttcgttccaagatcgtgtctgaagagttcggttgggacaaggatcttgccaagagaatctggtgctttggccctgagacccttggacccaacatggtggttgatatgtgcaagggagtccagtatttgaatgaaatcaaggattctgtggttgctggattccagtgggcatcaaaagaaggtgctttggtgaagaaaacat

SEQ ID NO: 88238 - DNA, 253 bp, Glycine max
  Clone ID: 700907954H1
attctaactctgaaaggttgcaagttcaacttaaaggagctggcaagactccttacagtcgctttgccgatggccttgccgtcctccgcagcagcgtcacggagttcctttgcagtgaggcaatgcaccaccttggtataccaacaactcgtgcactttctcttgttaccaccggcaacctcgtcacccgtgacatgttttatgacggcaatccaaaggaagaacctggcgcaattgtttgcgagttgcccaa

SEQ ID NO: 88239 - DNA, 251 bp, Glycine max
  Clone ID: 700907955H1
gcaacaattagtaaatcataaaaagtgagatatatacaaagcccagatttaaaatcacaatctatagagagaagcaagcacagactatgataccatctatctcccaatttctctctctaaaaccgccgtctccttctcagactagccgctgcagcattttctctgcgactctcgctcggaccagcacttggatgtgactggtttcggcatcggttagatcgaccatggcggaggtttccggcgagggagta

SEQ ID NO: 88240 - DNA, 122 bp, Glycine max
  Clone ID: 700907960H1
caccagcgaagtacacgacttggccgttctagttcagttgttaacactcatatcctgttacaaatcacttctgctcttatcgttgtttgttcctcacttgttgctttcattcagtttcagtg

SEQ ID NO: 88241 - DNA, 246 bp, Glycine max
  Clone ID: 700907963H1
ttctttgccagcagggaatctcaatgaggaagaatgggtaactgtgtatggattttcccccggtgatactaacatggtgttaagggagtttgaaaaatgcggtgaaattttgaaacatgttcctggtcctagagatgctaactgggtgcacattttgtatcagaatcgatctgatgcccataaagctctcaacaagaatggaatgcaaattaatggagtactaattgttggtgtaaactgttggat

SEQ ID NO: 88242 - DNA, 255 bp, Glycine max
  Clone ID: 700907966H1
agaagttctaaggaagagggaatatgcagaatacaaggtgctagttgtctatttgcaataacaacatcagcgatccaaccttagtattcttcaacccagagagatttgtaataataaattacaacaacttaaacgatggcaggaggagcttatgtagattcgggaaatgcaaagcaatttgatgggaaggtcacggcattcgtattggttacatgctttgtggcagccatgggaggcttactctcggttatgatc

SEQ ID NO: 88243 - DNA, 254 bp, Glycine max
  Clone ID: 700907967H1
agcaaaggcagtgctaggaaagtattatcgtgagcctcagaaatctgggccattgccacttcatctaataaagtacttgctccacagcataagtcaggatcacttcgttagcgactctggcgacattgtgtactaccagactgattcccagctccacaaagattcttggacccagtccaactaaagtttttgatgctacatttacctatttcactcttaaatactatttcctatgtaatatgaatttagaatat

SEQ ID NO: 88244 - DNA, 95 bp, Glycine max
  Clone ID: 700907969H1
gagacattttttttttctcgtttctcttaagccatataccactttggtcatactcataatccgttgtcttcattttcactaggtccacacaacat

SEQ ID NO: 88245 - DNA, 250 bp, Glycine max
  Clone ID: 700907971H1
tgtcaccggcgcttccggttacattgcatcctgtatagtcaaaatcctcctcaatcgcggctataccgttaaggccaccgttcgcgacacaagtgatccgtataaaataaaccacttggttggcctcgacggtgctaaggagaggctgcacctctacaaggcgaatcttcttgaagaaggttcctttaactctgtcgttcaaggttgccatgctgtgtttcacactgcttctccctatttcacaatgtca

SEQ ID NO: 88246 - DNA, 245 bp, Glycine max
  Clone ID: 700907974H1
gtaacagctatcggttctatcttggggtagaacttctaaaatgtgaaggcagtgagtccattctcaagtctctttggcatcactcggatgcagttttgtgctgctctttaaaggcattacccgttttcacgtttgcaaatcaagctggacttgacatgcttgagacaactttggttgcacttcaagacatcactctggaaaagatttttgatgacaatggaaagaaaactctggcactgagttcc

SEQ ID NO: 88247 - DNA, 242 bp, Glycine max
  Clone ID: 700907976H1
aaaatgggaggtgcctgatggaacaattccggtccgaagagaaaaaggatgacatgttaagggcaagctctgttcagcattttggaaagaagaaggataggagcttccctcagccaaaacctgcaaaacctctacctgacatcatcagtcagagtggccaccagcatgccatagcgtatgtggagggagataagtattatggagccaaggcaaccataaacgtctgggaccaaaaattcaac

SEQ ID NO: 88248 - DNA, 244 bp, Glycine max
  Clone ID: 700907978H1
gccccagatcagatcctctctcttcaattcaacttcaagccaaaccaagcaacatggctcaacaacaggaggacgaaatggagtatgttgctgatgataatgaaatggcggaagtagaagatgacatgtatttccgtggtagagtgtttggtgattcagagtccgaatcagatgacgatgatgaatatgactccatggaaaatcggatgacagatacctctgctgcagaagccggaaaggaaag

SEQ ID NO: 88249 - DNA, 255 bp, Glycine max
  Clone ID: 700907979H1
gaaaaagcatatggtctcccgtcacagatccaagaagtggtttcaaccgggaatccagaactttccacagcctcaagccccccctccgtctccctccccccaacgccgccgtctccgcagccgccttcgccctcttcctccgccgcaactcgcagttacccgggactcctccaccgccctttatcgactctgtccaccggccaaccgcctctgcactacggcgatgctcctccaccgcgccaaaacccttagcct

SEQ ID NO: 88250 - DNA, 246 bp, Glycine max
  Clone ID: 700907980H1
cactcctcctcttctcacggccagggttttagggcagcttctttctttgagattaagtttcagtagtaatgggtaaggaaaaggttcacattaacatcgtggccattggccatgtcgactctgggaagtcaaccaccaccagtcaccttatctacaagctcggaggtattgacaagcgtgtcatcgagagattcgagagtgggaagctgctgagatgaataagaggtctttcaagttgcctgggtg

SEQ ID NO: 88251 - DNA, 164 bp, Glycine max
  Clone ID: 700907983H1
ggcttatggtggatacctaggcactcagagacgaggaagggcgtagtaagcgactaaatgcttcggggagttgaaaataagcgtagatccggggattcccgatataggtcaacctatcgaactgctgcccaccctggaaacggctcagccggaggtagggtcca

SEQ ID NO: 88252 - DNA, 249 bp, Glycine max
  Clone ID: 700907986H1
gtcactttacccaatcctaacactttcttctctctgttttccttcttcctcgcatcaatggatccggacggcgttctcctcggcatgtgcaaccctctcctcgacatctctgccgtcgtcgacgacgctttcttgcaaaaatacggtatcaagttgaacgatgcgattctcgccgaggataaacacaaacctatgtatgaagaattggctaacaatcctaatgtggagtacattgctgaggtgctactc

SEQ ID NO: 88253 - DNA, 243 bp, Glycine max
  Clone ID: 700907988H1
ctgatattgatcgtcgaatatcagagcatgtccttcgtatgcatcgatttcgttctgctgttgatggaggtgaggcagcacttgatgggagctcaagatatggaagagaagatgaagctgatatggactcatctgtctttgtcaaatataacagaatgttacatgggaagaaaactggaagaggtcaaaaacgtgatacgcttacaattaagtttcttaaaaaatttatccactagctaagca

SEQ ID NO: 88254 - DNA, 243 bp, Glycine max
  Clone ID: 700907995H1
ctgatattaatcgtcgaatatcagagcatgtccttcgtatgcatcgatttcgttctgctgttgatggaggttaggcagcacttgatgggagctcaagatatggaagagaagatgaagctgatatggactcatctgtctttgtcaaatataacagaatgttacatgggaagaaaactggaagaggtcaaaaacgtgatacgcttacaattaagtttcttaaaaaattcatcactatgctaagca

SEQ ID NO: 88255 - DNA, 272 bp, Glycine max
  Clone ID: 700908001H1
gaaatcctaagattgtttagttggaagatggaggcagtggaatcaatagcggttccggaaccggacgaagacgatccttcatcgacgcttctggatctctcgagttaccagctccacgaccttgactcggtcgagttgccacccagcctcaccgagttggacctcaccgcgaatcgcttgtccacgctggacccgcgcatagggaacctctcccatctcaagaagctctccctccgccaaaacctcatcaccgacgccgccgttctccctct

SEQ ID NO: 88256 - DNA, 259 bp, Glycine max
  Clone ID: 700908003H1
gtgatatcatttcatttcagagggattaattattgttttatttttaagtgtggagtgctgtgcaggtcaaggcccttttacttgttcgtccggttgttcccatcttctctctcgtaccaatcaaatcacacttttgtgttgtgttgggaaaccctaaaccccgttttcggtgagatcgagatcgatcgaacatggatgaggagtacgatgtgatcgtgttgggcacgggtctcaaggagtgcattctcagcggtcttct

SEQ ID NO: 88257 - DNA, 257 bp, Glycine max
  Clone ID: 700908006H1
catcacttctgtgtttctctcttcacctacactttcctctttcaattcagttcaattcttctttttggttcagaaactctgtacagttaatcaaaccctacctcacctcaccggttttagctgttaatttaatatatagatagaaatccaaggaagaagatgaagcagtttgccgtccaaaacgtcgtcgttccatcccacgatgagattagcgttgtttgccccaagccccgccgcctcggcctcttcaacttccc

SEQ ID NO: 88258 - DNA, 255 bp, Glycine max
  Clone ID: 700908008H1
gaaaaaaaacacacacacacaaacacaagcacagttgaaaatggctctgcttaccctctcttcgctgcaatgagtagaacgtttgtatttcttctccgaagaagaaaaatggctctcggcgacgatgcgcagaccactctccctcgttcctcgatgcccttctctgcgaagagcgagaaaccttcgaggaagactttgatgagaacggttatgagcgtgagaccgaaaacaacgaacccactgtgataaagtcgc

SEQ ID NO: 88259 - DNA, 253 bp, Glycine max
  Clone ID: 700908009H1
cttatcaagaatcttgagaatgtcatgcggaaattccttcagtccttggagcttttcgaggaaaatgagaggaaaaagttggcaatcttcacagcacttgctttttcccagaagctgtctggtctcccaccagaaactgtgttccaaccacttcttaaagatgaccttgtggccaaagggctagttctgtcatttatgactgacttctttaaggagtatctgattgacaacagtcttgatgatcttgtttcaa

SEQ ID NO: 88260 - DNA, 251 bp, Glycine max
  Clone ID: 700908010H1
cacaatctcgctcttttggtccaaaaataaatcaccatgcccagatctcgtcctgccactgatttcgctgatcttgaatgtttgaaatgaaaatttccatgaccaaagtcttctttaccttctaatttggtttggaattttcgtgggcatgaaaacaaggcctttcatttcccaaggttgatttggattggaggatgggtactaagagtctcttaatgcttaagtcccacattgattccatcaacatacga

SEQ ID NO: 88261 - DNA, 253 bp, Glycine max
  Clone ID: 700908011H1
gcaaactctatgaaggtggagttacactacctacaaagtttcttagcaagatcgcccctataccagtggtcaaggaaatttttcgaactgatggcgaacagttcctcaagtatccaccacttaacgtggttcaggtggataagtctgcatgggtgactgatgaagaatttgctagagaaacgattgctggtgttaatccagatgtcattaagattcttgaggagttcccaccacgtagcaacgtagattctcc

SEQ ID NO: 88262 - DNA, 233 bp, Glycine max; identical to SEQ ID NO: 87239
  Clone ID: 700908012H1

SEQ ID NO: 88263 - DNA, 264 bp, Glycine max
  Clone ID: 700908016H1
gaagcttttaacactcatggatgatttttgtgaaaagattgatgatcatcaatcaagtttctctctttttttgttcccacccttttgaaaagcttttgatcagcatcttagttgtcaatttgttggatctcacatttcttgattgggcatggaatttttaatctcccttttcttgggtaaggaataaaatgatgatcacttgttattatgcaaaattcatatcagattcagaggctattctggtgggttcagcaagaaatctat

SEQ ID NO: 88264 - DNA, 267 bp, Glycine max
  Clone ID: 700908017H1
gcaaagactaatcgatgattgtctcagaaagtcatatgaaattgcccttgggaatgctgaatttggttattgcctggctgtcaatgcggatactgctctttcagagttgagaagtgaattgggacatcaattagctactaaaagccagaaaatgaatttgaggggtattggtgctgttgtttataatgtaccagagcttgaaaatgatcaaaggctaaaaataagtctgaggagtgtggagaatgaagataccacgcctatctctca

SEQ ID NO: 88265 - DNA, 259 bp, Glycine max
  Clone ID: 700908018H1
gagaggtggatccagacgcgttggcaaaggcattcgtggagcactactacagcaccttcgacaccaacaggaacggcttagcgaatctctaccaggagggttccatgctcactttcgaagggcagaagatccaaggcgcttccaacatcgttgccaagctcacctccctccctttccagcagtgccaccactcaatctccaccgtcgactgccagccctccggcgtcaacgccggcatgctcgtcttcgtcagcggaaa

SEQ ID NO: 88266 - DNA, 199 bp, Glycine max
  Clone ID: 700908019H1
tttgtggttaagtacaaaacaatctcaggaatcttctccgtggaacgcatgtgtgaattattcaattgcaactactgctatgtgtattttctttttgcctaatcatataccataaacatgaagttgtgcttccttttattgagaatgctttagcatgcatgattatttatagagcgtttcatatataagtatattttaa

SEQ ID NO: 88267 - DNA, 253 bp, Glycine max
  Clone ID: 700908023H1
cacattcaaatccaaatggccctttacattacactaataattggcgtcctagtaaacaccctagtaacctatgaatagcatttgcatgcaccttagtcttcaccaaaatactcctcttggcatcttgtcctgtgtccctcttttaagctatttccttctcttaacacaattggttgtgccaattgccatagtcaccaaccaattaacaaaggtatatatatcatcatatcatcaccaaatgagaaatattggg

SEQ ID NO: 88268 - DNA, 243 bp, Glycine max
  Clone ID: 700908025H1
acacactaccctcaacatagtaaagtagctggtgcaagtgaagcagtggctcaaaccatgttgctcatgtctagtgtctctagcagttattccgtggatttgaagaaagaccttttcctccaattgcagagtcaaagtttaaggcctaagttctctcaactctcattcaacccacttccaccatcaacttcttctccttcttcaccccgtagattcacaaccctggctctcttcaaatctaag

SEQ ID NO: 88269 - DNA, 249 bp, Glycine max
  Clone ID: 700908027H1
caaaaatggagagagtagataaggtgttggtgatgttgagcatggtggtgttggtgcttgcatcaaatgctgaagggggacgattagttgaggaagagaatgtggatcagccccagaccttccttggatcaggtggaggccttggtgggatatttccaagcccaagcccaggcttcagcttcaccggcgtgggctttgagccatctgggttttgcactttccctggtggttgcaccggtactccttctt

SEQ ID NO: 88270 - DNA, 258 bp, Glycine max
  Clone ID: 700908030H1
ggaaaagcagctgccaaataaagggtaatgaacaaggaagtgaagctcccaaaattaaaccaatgcgtttcactcttgctgtctaacatgcactttcccgattgctagtgtttctgttttagtttgtcagtaattgataggtgttctactttcagggcagtgctctgaggtaatgctgttcgattttacttctcagtctactacagtgtgtatttggtaccaaacttttatgctaaaataatccaaggcgtgtgtttt

SEQ ID NO: 88271 - DNA, 261 bp, Glycine max
  Clone ID: 700908031H1
aaaatcttcaggaaatgatttatatagtttctgcttgtaagcaaagaacgatggcagaaaaatttcaatattcttgtttcctctaaatctgtttccctgggcctgcaagaaatagatattggtcaccgaggacatgaatagaaagattgcataatttgcacaagatattgattttttgggtgccacttattccctacatccaccgagaagggtcagagcggattacaattttctgccattgctgagttgaatgcacacaaa

SEQ ID NO: 88272 - DNA, 148 bp, Glycine max
  Clone ID: 700908034H1
gggtgatgcaggatggaactccatggccagggaacaacactcgcgatcatccaggagtgattcaggtatatttaggaagtgccggtgcgctagacgtggaaggcaacgccgcacccccacttgtgtatatttcacgtgaaaaacgtcc

SEQ ID NO: 88273 - DNA, 250 bp, Glycine max
  Clone ID: 700908038H1
tgagaacaagaagctgattctggcaatattggacaatcaaaatcttggagaacttgcagaatgtgcccagtaccaagctcagcttcaaaagaatttgatgtatttagctgcaattgctgatgcccagcctcaaacaccagccatgcctccacagatggcaccacaccctgccatgcaaccaggattctatatgcaacatcctcaggctgcagcagcagcaatggctcagcagcagcagcaaggaatgttc

SEQ ID NO: 88274 - DNA, 250 bp, Glycine max
  Clone ID: 700908041H1
ctggcggaaacagagaaaggcacaaaaccaagtccctcttcttacctacaaactcacaaccttttccttccgccatataaaatctactattatttctcattttcatttcaacgtaacgttgatgggtcttcgcttttcgtcttccgaggcggcggcgtcggaatcggcatcgccatcgtccagtttgggcgaattgcccgagagctgcgtcgcccagatcatgacctacatggatccgccccagatttgc

SEQ ID NO: 88275 - DNA, 260 bp, Glycine max
  Clone ID: 700908043H1
ggaattctgctcgacgcgtgctgtgccggggcttgctcagcggaaacaggctatgtggggccatcccgagctcggtttctcagatttaccgtctggcagatctggatctgtctcgtaaccagatttctgggcccattccggagtcgctgggtaaaatggcggttttatcgacactaaacttggatatgaataaactctctgggcccattccggtgagtctgtttagttccggaatcagtgacttaaacctgagccggaac

SEQ ID NO: 88276 - DNA, 251 bp, Glycine max
  Clone ID: 700908044H1
gcgttaagcaaaaaacccagtcaggattcaaagtctctttgtttaccttgtttccctcattgctttgctcacattgaatttcgaaggcgtagagtgagatccgaacgatgaagagagtattcggcgtcaagaagaacaaggatccacccccttccattcaggatgcttccgaaaggattacaaaacgaggtgacacggtggatgacaagattaagaagcttgatgccgagcttagtagatataaagagcag

SEQ ID NO: 88277 - DNA, 252 bp, Glycine max
  Clone ID: 700908046H1
cagtcatgcgatgcatcattactgttagcgacggtgagcgatgtggtgtcggagcagacatcggatagaagttttgggatgagaaacttcaagtacgtaaacactgtcaaagcagcggttgagaaagaatgccccttcacagtgtcatgcgctgacattgttgctctttctgccagaggtgccattgctttgttgggaggaccaagcattgaagatgggacagggagaaaggacagcaaagaaagctatgca

SEQ ID NO: 88278 - DNA, 260 bp, Glycine max
  Clone ID: 700908049H1
ctcgagccgctcgagccgatttagaaggaaaaccaactgcacattattatgatcccaaattagcattgactagtgcgattaaaattgggaatcatatatatgctggttccattttctacccctttgtaacacgttttgatgttgagaaatatcctgctctccccacagtttcagcaacagtgaacatcttgtaaggttaatgatgtacaagaaaatgtttagtttctggagtgtcatgatgtgaaaatgtttagtttctg

SEQ ID NO: 88279 - DNA, 245 bp, Glycine max
  Clone ID: 700908057H1
tttccatctttcttgggtgatacgatccaatggctgcgacccttttccagggattgggagttgtgaccccatcattctcttcttcccactccaacaagttcatgctttcttccctctcagagaggaaagatggcatatttgtggtcagatctgatgctgatgcaaggattctgaagactggagctcgttagcatgaattgttggttactaatgcagttgcaacaaagggagccagttctgcggcc

SEQ ID NO: 88280 - DNA, 218 bp, Glycine max
  Clone ID: 700908065H1
cttaatttctctctgccttgctcatttacacacctctccaacctatcactttcagctttatttgaatccctctctctcctttccaaatggccagcgttgaggttgcacatcaaacaccaacaacagttccagaaaatgaaacaaccgaggtaatcaagacccaggaaacaaccccggaaccagtaccagccactgaggctcctgcaacagaacaagca

SEQ ID NO: 88281 - DNA, 257 bp, Glycine max
  Clone ID: 700908066H1
gcaagattttccttggttctcttctctcgatcgggtgtgtacgtaattaacataacatgtttcgataaccacacaccccttgtgtcatggcatgatgatgatgatgattagaccagtaacgtggccctgataaagttttcaaagtctaagcatcttcttccttgttctcatgcatgcctgatggaatcgacgacgcaaaagaacaaaagcaaaaagtcatcgctgttgatgcgtctcaaacccgttatgggcttcga

SEQ ID NO: 88282 - DNA, 254 bp, Glycine max
  Clone ID: 700908067H1
caacttttatacacactctctcagtcactcagataccctggatctagtggaaatcccgatgctgtgaaggccctctgttggcatagagcttattagcaggattcattgtcaagagagtaaggaagaaagctcagaagcagagtctgtttgttcacttggatgccacatatcgcaggaggtcaagcatttgcgtgaagggataaaacatgggttaaaatccgagttagaaaaggcttcacttgtgttgggccgta

SEQ ID NO: 88283 - DNA, 249 bp, Glycine max
  Clone ID: 700908069H1
caaaatcttcatattcatcaaactcatcaaaatgagtctgtaccactcctccaccaccaccaccaccaccaccatcttcaccgtcatattcctcctccttgcaatactattcactctcacaccccacaaggccaacggtgccacgtgtcaccctgaggaagaagcgggcctgttgggcttcaaatccggtatccgatccgacccgtccggcctgctcagtaactggatatcgggtacggactgctgcac

SEQ ID NO: 88284 - DNA, 242 bp, Glycine max
  Clone ID: 700908072H1
cctgaatggatgaattttgagagtgatttggaggccaaggagaaggaacttgccaatgggagattggctatgttggcattcttgggattcatagttcaacacaacgtgacaggtacaggaccatttgagaacctcttgcagcacctctctgacccgtggcacaacaccatcatcaatacaattcgtggctactaagtttgtatccagtggacatggataagcctgtgtccttctcgtgtaat

SEQ ID NO: 88285 - DNA, 245 bp, Glycine max
  Clone ID: 700908074H1
cccaatcgtagccgtcgcactttgcgttttctgcgtcatgtgcgattccccgacaatggccacccaaatgagcaagaagagaaagttcgtagctgatggagtgtacttcgctgaactgaacgaggttctgacaagggagttagccgaggacggatactccggcgtggaagttagggttacgccgatgcgcaccgaaatcatcatcagagccaccagaacccaagccgttctcggtgagaagggaa

SEQ ID NO: 88286 - DNA, 235 bp, Glycine max
  Clone ID: 700908076H1
gtgaatcatcatgactggctctagcatttaaacaacatccaatagagatttgtggtttgcatgggaaggaaagtattgggtccttttcattcatgtaacattattcatcatagtgtatattttcttttaattgtattaactaaccagtgtaattagataccctacaagttaggtactgtcccctggcatgtagttgtattttagggggaataatggggtggtccttaggctttgt

SEQ ID NO: 88287 - DNA, 251 bp, Glycine max
  Clone ID: 700908078H1
aagagatcgcagacacagagcagaatggcttctacccaatgtttcttgcaacaccatgctcttaccacccctgccagtgccagatccccatcactacgcatcttggttagcaccaagcctaaccagcttgtttgcaaggcacagaaacgacagacaccacaagaggatattgatgtcagcccaatctctcgccgtttagctctaactgtgctcattggtgctgctgctgttggctccaaagtccaacctgc

SEQ ID NO: 88288 - DNA, 99 bp, Glycine max
  Clone ID: 700908081H1
cacaccactacccccccaccgaccccttatccgccagcaccaacaacaactcatggcacgctgtccagaagcactacgatgatcagggtcgcaaggtcg

SEQ ID NO: 88289 - DNA, 242 bp, Glycine max
  Clone ID: 700908084H1
ggaagtttcaccctatgtggagagttgcaacaggaaagaagacaaggtacccaaggatgagagcacacatgatgtcaactcgtggagaacaagaactgaaaatgggtcattgatgagagatattccacttgatcacatctcagacaattcagcctccaaaagttgcaggagagaaaatagtggtactgatgatcagatgcttgaattatgggaaactgccgagcaagattgcttggctagtt

SEQ ID NO: 88290 - DNA, 246 bp, Glycine max
  Clone ID: 700908086H1
agacaattcaacttaagaggtcaatatggccaccaccactacccatcctccctctaatatctgttttttccttctgttgttgcttctagcacactttcatttgggcataagccaacttgagctgagttactactctaaaagctgcccaaaagctgaagagatcatcaaggaacaagtcacacaactgtatgacaagcatggaaacactgccgtttcgtgggtcagaaatctcttccacgattgcgt

SEQ ID NO: 88291 - DNA, 171 bp, Glycine max
  Clone ID: 700908088H1
gtgtaattatcagagttggggagcctggtaagggcgagtggaatttttggtgccattgtttgccatttgtaatttaacttgccagtcctttcatgtacagaaataaaaggaaattccgtgtgggactttgatttcaaataatctctatcgaatttgaactagttggaattg

SEQ ID NO: 88292 - DNA, 240 bp, Glycine max
  Clone ID: 700908089H1
gcaggtttgggagtatggatgggtttcgttagcctgtgtcttctgtctgtatcagtatgaggtctgctccaacgcctagagcaccctgtcaaagctgatggctcagttagccttatggtcattggagactggggaaggaaaggaacgtgcagtaaatctcaagttgccactcagatgggaagggttgctgcaaagttagatatcgactttgtgatatccactggagacggtttctacgat

SEQ ID NO: 88293 - DNA, 244 bp, Glycine max
  Clone ID: 700908091H1
ccctgattaaaggttatctctaaggtcctaaacaatcctctttcaaaaacataccgagataagtgtggaaatgacgacaccatcattggtagagtctctagttcttcaactccatgagatctcagctgtcaaatttggcaacttcaagctcaatctggcatcttctcaccaatctacatagagctccgcctcatcatatcttacccttctctcctccaacagatctctccgaaccttatttctt

SEQ ID NO: 88294 - DNA, 250 bp, Glycine max
  Clone ID: 700908095H1
gaacaagcagcattagcaaccaagcaagagaatggcgacgacagcagccttgtgcggcactatgatgagcagctccttcctgaggagaaaagcagtggtcacaagcctgaaggcattccccaatgctaacgcagtgtttggtgtaaagggtggacgtggaggtggtgtgactgccatggctagcttcaaggtgaagctgataaccccagagggagagaaagagtttgaatgcccagatgatgtatacatt

SEQ ID NO: 88295 - DNA, 280 bp, Glycine max
  Clone ID: 700908101H1
tttagaacctataatgaatattaatggccgacgaccctcggccgagtctttacttcctcctcctgactttgagtctgcaaactatccgaagggctggctgattggcaagaagagaaaactcgttaatgtcgatgttgttgaaagcatgagaaggattgccatccaagaaatgaacagaaaggacagggaaattgatgggctgaatgaacagctggaggaggattcacggtgtctagagcacttgcaactccaacttgttggatgacaaaagcatacgcgc

SEQ ID NO: 88296 - DNA, 277 bp, Glycine max
  Clone ID: 700908102H1
tgagcagccaaacactctctctctgtctctcgaaaattctcagtttgcagagaaaatctgaatcatgtcgtggcaagcgtatgtcgacgatcaccttctgtgtgacatcgaaggtaaccacctcactcacgctgctatcatcggccaagacggcagcgtttgggctcagagtaccgacttccctcagttcaaacctgaggagataactgccatcatgaatgactttaatgagcctggatcacttgctccaactggattgtatctcggtggcacaaat

SEQ ID NO: 88297 - DNA, 268 bp, Glycine max
  Clone ID: 700908105H1
gtgaaaacggacgatccgaagaatattaccctctctctataacattattcatcagatcagtttgatcttatgtaaatgaagtatttttagacaaaacccagattcactgaaaaacctcgaagcggagaaaaaaggcaacaacttttcatctctacgcaagtggttatggcggttgctgagaatgttggggccaaaatcggttcttcgagccagagcttggagaacgggttagtgtcagcggattcgggtgaggttgagaaatcgaaaa

SEQ ID NO: 88298 - DNA, 271 bp, Glycine max
  Clone ID: 700908106H1
gtttagttaacagcaagtggcaaatggcatgcatatccgcaacggaggcagagattgagcgtatgatatgagagagaagacggaacaaaatcaagggcggagaatgccccatggctgacatcatgtcggttaacactttattcagacaacactatacttcttaatcaaaatcaaatgacctaaccactctctctttttcccaattttcgaatctctctcctccatggacccaacttcgatccctccccctccggccaccaacgtccccttc

SEQ ID NO: 88299 - DNA, 269 bp, Glycine max
  Clone ID: 700908109H1
cagcaaaagacctgaagcagttgctgtgtgaaatgcccatgtggttcaatattcaccgtatgctccaacacagtactcatgaattagtggcctatcgagcaccattatgttgcctggcctgctgtcaccactggcaatttgcttttctctggaaataactataagaaatcagtccaagtaaggctgctgctgtgatgcgtagtttgtgtataatcttttggagtatcaggacaagtttaattcaagataaagccctttactctgtatca

SEQ ID NO: 88300 - DNA, 269 bp, Glycine max
  Clone ID: 700908111H1
gtggtattcagcccgggaatccaatttaggggaccgtcactcgtcacgcactgaactgcaaagaaatttccgtagaaatttccgtgaagaaagagtaaatacctaaagtagtaaacgttcacaattacatgaataatcaattgatcgattccccttgatcgctctgttttactgtccgtttcaaatccgacagcagcccagcccggcccggcccaatcatgactcccaaactccaaaccgcggcctccgtggtggccaccgcgatgctc

SEQ ID NO: 88301 - DNA, 208 bp, Glycine max
  Clone ID: 700908113H1
gtggcaccatttgaggcatgttatgattcaaccagcattagaaattcctcaactggactagttgtgccaactattgatctagtgctgcgaggtggagtgcagtggactatttatggagccaattcaatggttatggcaaagaaaaatgtagcatgtcttgcaattgttgatggagggacagagcctagaatgtcgttcgttagagctt

SEQ ID NO: 88302 - DNA, 272 bp, Glycine max
  Clone ID: 700908114H1
gtgatagcaatggcggtggcggtgacgacagcagcaaggccatagttggagcagtgcttggcataggaagcgtgcttcttattttggtcattgtttgcgttgtttgctccaggaagaagaagaagaatagaatgtactattatgcaggagagcaatccatgggaaaagggaataataataactattacaatagcgggcaacacccaaattattacggaggtccacatggggaccatgttgtgaggatgcaacaaaatggaatgggtcctggt

SEQ ID NO: 88303 - DNA, 271 bp, Glycine max
  Clone ID: 700908115H1
aatggatcctcattctgtggtggacctgactgaggataaagatgttgatgttgagttcatgtacactgcaaaatggaaggaaacagatacatcttttgagaagagaatggataaatactctcagtcttcttctttgccacatcacttggagattcactggttctcaatcataaactcctgtgtaacagttcttcttttgactggttttctggcaaccattctcatgcgtgtattgaagaatgactttatgaagtatgctcaagatgaggaa

SEQ ID NO: 88304 - DNA, 84 bp, Glycine max
  Clone ID: 700908117H1
ctattttctagtatttggcacatagtgcattgtttgggccattattaatcaaccaaggataaacaccaccttttggcttcttct

SEQ ID NO: 88305 - DNA, 143 bp, Glycine max
  Clone ID: 700908118H1
gagcgtctaacggagattcggtacggtagtctttctccccagttccctgtctgtaggtggggagttcctttctctcaaacattcggtgcggtatactgcttttgatttacaagtcaccttcgctttgagtttcttttagccat

SEQ ID NO: 88306 - DNA, 273 bp, Glycine max
  Clone ID: 700908119H1
cgccgttggagaacgctccaattttctctccaacaattcgttctttcccttctcaatttccggcgagttatccctcttcaattactcgtaagattcatcgatcacaaacttatattgatttcgtttttctgacactgatcttatttttccaatcggttttcttctccaacatttatcgcttccagaatccagatctggatgcacatgaaccattgtttgcatttggggcaaccttgatttgggtttttaagtgctttatggaaactgtggtct

SEQ ID NO: 88307 - DNA, 270 bp, Glycine max
  Clone ID: 700908120H1
gatctgccaaacgctacatggtcaactctgaagacttatgggaaacccccggtctcacgtggcggacaatcagttacctttgtgggtacaagcttagtaatttttggtggagaagatgcaaagagaactctattgaatgatttacatattcttgatttggaaaccatgacatgggatgaaattgatgctgttggggtgcctccttctccaaggtctgatcatgctgcggctgttcatgtggagcgatacttgcttatctttggtgggggt

SEQ ID NO: 88308 - DNA, 144 bp, Glycine max
  Clone ID: 700908121H1
cttctctgttaaaaaaaaattaggcgtctaaagggccaaagcttagaaagttgaagcttttttgttgaggtgaaagtgaaatggttggcaaggataatctgagggctgaggacttgaacttgtgctttaagaagcttatgatgg

SEQ ID NO: 88309 - DNA, 215 bp, Glycine max
  Clone ID: 700908122H1
gtgctgttcttatcattgattcgaccactggtggttttgaagctggtatttccaaggatggacagactcgtgaacatgctctgctttcattcacccttggtgtgaaacagatgatttgctgctgtaacaaaatggatgctactacacccaagtattccaaggccaggtatgctgaaattgtgaaggaagtctctgcctacttgaagacagtagga

SEQ ID NO: 88310 - DNA, 266 bp, Glycine max
  Clone ID: 700908123H1
caaataaccaaacttatcctatgtctgacttctacctttgtttcaacaccaagttcagacacaaagcagcgaggtttttcataacaaaggagaatgaaggctttttcagttaaagttgaggaaggaagggaaggtaaaaatggtaacctttctgttggtccagtataccgtaacctcctctcagaaaatgaatttcctccaatggatcctgatttcagtaccacttgggatattttctgtgtgtctgtcaaaaatcatcccaataa

SEQ ID NO: 88311 - DNA, 268 bp, Glycine max
  Clone ID: 700908124H1
gaggccttcaatttcacccttcacacgtggtggtggttttgttcttcttctcttcccctttctttttcttcttctgagcttgtttaagctctttctatttgattccattaacatatattattacaatgtgtggtattcttgctgttcttggttgttctgatgactctcgagccaaaagggtccgcgtgcttgagctctctcgcagattgaagcaccgtggccctgactggagtgggctccatcaacatggtgactgctttttagcaca

SEQ ID NO: 88312 - DNA, 269 bp, Glycine max
  Clone ID: 700908125H1
gggtaagggtaagcattcaaaaccttcttgttataaatattgaacaccacattcaaagcccaccaggttgctgtcgccccaaagactgatcctgagttttggaagtctttgttccctgttgctgttgcacatacaattggacatgtagcggcaacagttagcatgtcaaaagttgcggtatcattcacacacattatcaagagtggtgaacctgcttttagtgttctggtttcaagattacttttgggtgagagctttcctgtgccagt

SEQ ID NO: 88313 - DNA, 271 bp, Glycine max
  Clone ID: 700908126H1
tgccacaccatggcctcaaccaacgccctctcttcagcttccattctacgctctcccaaccgccagtctctgaccagaagagcgaaccacaacggaagagtaaattaccgtcaaccgaatagccgtttctccgtcaaagcctccgccaaagagattgcctttgaccagcattttccgctctgctatgcaggccggcattgacaagctcgccgacgccgtcgggctcactcttgggcccagggggaggaatgttgtgttggatgagtttgga

SEQ ID NO: 88314 - DNA, 266 bp, Glycine max
  Clone ID: 700908127H1
tgaacttgtttctcaagtctattggtcttagagagtattcaaggtacattagtttcaaccacccttatagtcatgagaggccccttctaggccaccttaagtttttcccttgggtggtgaatgaagggtactttaaggcttggagacaaggcagaacaggttaccctttggtagatgctggcatgagagagttgtgggcaactggttggttgcatgatcgaatacgtgttgtggtttcaagtttctttgtgaaggtgctgcagctt

SEQ ID NO: 88315 - DNA, 269 bp, Glycine max
  Clone ID: 700908128H1
ggaaaggtctgacagaattcatgttatcgatttcgatattgggtttggagtgcagtggtcatctttagtgcaagagattgccttgagaagtagtggagcaagttcatgctgctctgatccagctaagcctgaacttctggcggtacctctctctctctctctctcacccacacacacacacacatttcaatcaacagcatttgattttttcaataaccctttcaaatttctggccctgttcgatttcccatttcttaatcgcgtcagaa

SEQ ID NO: 88316 - DNA, 269 bp, Glycine max
  Clone ID: 700908129H1
agagcgagcagtttcagacacagagagaggggtttgggattggagggattgacgctgcgtctcttcctcttctctttcgatccatccctcattcctaatcctccaatccaaccacctcagcctcacactcacatatacacatatctgaacgcgtatcgtccctcctatggcttcaaagcgcatcctcaaggagctcaaggacttgcagaaagacccaccaacttcttgcagcgctggtccagtagctgaggacatgttccattggcaag

SEQ ID NO: 88317 - DNA, 271 bp, Glycine max
  Clone ID: 700908130H1
atttaggattgtggtgtgttgttgttgtattgtaggtattggtgggtgaaatcaaaaaccctagccctcactctcatcactttttttgagctatgtttcaagagagttagttagggataatagggcagggaagaataagagggatgtacaaagaacgagagcgagttggtgtttctgtttccgcttccaaatcggaggatcggaagcgaatcaacgacgttctcgataagcacttggaacgatcctctccttccacttctcgccccatcac

SEQ ID NO: 88318 - DNA, 267 bp, Glycine max
  Clone ID: 700908131H1
aagggcatgtgagaaaaaacatactaatcaaattaaacagcgaagaagagtttcaaatttattgcttcgaatctccagcttcgtcagggaaggaaaacagcataacgtgtggtctcgggggaaccaaaaactgtgaaattctgaagccactaggccttttaaaaaccaaactaaggaagacggtttagacagagagtacttcaagctaagaaaatggaaagtggggttgtggctgtgaacaacaacatcaacaactatgaatccaag

SEQ ID NO: 88319 - DNA, 272 bp, Glycine max
  Clone ID: 700908132H1
gtccaaattaactgttctgatggagatggattaactgaacttgagaagctgattaaagcagaagactttcaccagatcagagatagagcatttgacagaacttatgcgttcaagaactgtgggttcatgctgttgggtatcaagtgacgagcccatgtttgggtccatcagatccaatgttgcctcgtgaacaaaagggagaatatcccaaaactccagatccagaaaatgcgattgaaaaccagcttgtttcaaccccatacgttactaag

SEQ ID NO: 88320 - DNA, 273 bp, Glycine max
  Clone ID: 700908133H1
caaaaatgagtgacaaaaacaacatggttatagcctccaaaacagccactggtagttcttcatcatcttcaagaatgtccacaaaaacattctcgggactcggaaacctcgtcaagctccttcccaccggcactgtctttctgttccagttcctcatccctgtcgtaaccaacagcggacactgcaccactcttcacaagtacctcactggctcttaccttgtcgtatgcgcattcaactgcgccttcgcctccttcaccgacagctacaccg

SEQ ID NO: 88321 - DNA, 269 bp, Glycine max
  Clone ID: 700908134H1
gtcaaacataacaggatgcatcagattcatggggtttgtctgtgagcttcctaagcataatcttgctgccgatagttggcaatgcagctgaacatgcaggagcaattatatttgccttcaagaacaagctggtgagaactgagagagtgataatattatcatattggccaagcaataaatttatttaattaaaatgttaatttagttaaactaaagtaattccttgaacacaggacatctcattgggtgttgcattaggttcagcaact

SEQ ID NO: 88322 - DNA, 81 bp, Glycine max
  Clone ID: 700908135H1
gttaagagaggccatttgccttttcaattttcatattaattcgatatttgtagtggctagcgagagaattctgaagccatc

SEQ ID NO: 88323 - DNA, 249 bp, Glycine max
  Clone ID: 700908136H1
tcgcggtgttcttggttcacttggcaaccatccctatcaccggcactggtatcaaccctgctcgtagtcttggtgctgctatcatcttcaacaaggaccttggttgggatgatcactggatcttctgggtgggacctttcattggtgctgcacttgcagcactctaccaccaggtcgtaatcagggccattcccttcaagtccaagtgattcaatcacaccgttcatgcttaatcaagttggggacaac

SEQ ID NO: 88324 - DNA, 259 bp, Glycine max
  Clone ID: 700908137H1
ctcatgcatgtggctagcagcagcagcaagtgcaaggtggccatgagcatgaccatggtcaacgaccctttgaggagaattgggaggtgtgaccaaaaaaaagaagccattagtggctctgaaattggagctgacaattctcctgcagcaggagcagcttcttcattctaatctggtgctatcctatctgagctttttactactactactaccctttctttcttcatctaatttctaccacacttttctctttgttttt

SEQ ID NO: 88325 - DNA, 259 bp, Glycine max
  Clone ID: 700908138H1
gttcagaacctatacgattcccttgatgtgcatgttgggcaatcagttgcagtggtagtaaccttgaatcagcctccaaaggactgctacattgttgcctcaacaagatttaccgagacacctctcactacaactgcagtactacactatgcagactctttttcctctgcattaggacccgtgcctgctccccccgttgataaatatgactttgattggtccatgaagcaagctagaacctacagatggaatctgagag

SEQ ID NO: 88326 - DNA, 266 bp, Glycine max
  Clone ID: 700908139H1
attctcttcactttaaagttacatagtttttcattgttttacttaatctacaatggctgcttcaacaatgactctctcttcatcatcattggctggccaagctatcaagcttgccccctccacccctgagcttggtgttggaagggttagcatgaggaaaacagcctccaagactgtttcctcaggaagcccatggtacggcccagaccgtgtcaagtacttgggcccattctctggtgagcccccatcctatctcactggtgaat

SEQ ID NO: 88327 - DNA, 263 bp, Glycine max
  Clone ID: 700908142H1
atcacttgtggatgcacacaagccattgatgtttcagtggtgatgcttgctcgccccggtgcaaacatcattcttccaagaccaggtttcccactctatgaacttagcgcttcatttagaggagttgaagtgaggcattatgatctgcttccagagaaaggttgggaggttgatctagatgctgttgaagctcttgctgatcagaacactgttgctttggtgattataaatcctgggaatccttgtgggaatgtgtacagtta

SEQ ID NO: 88328 - DNA, 264 bp, Glycine max
  Clone ID: 700908143H1
cgtgatgcagtatggtgatgtagggcttagcagagatgttctcttccattatttgggtacagatcctgctaatgataatttcacttttgtggatgaaaactccttatggtcaccttcaaaaccagtcaaccaacgtgatgctgatctcatccatttttgggataagttccgcaaagctcctgagggttctctcaggaaaaatacagctcagaaacaagttttggaagcaatgtctcacagaatgcatgtagacaacagtgtaaa

SEQ ID NO: 88329 - DNA, 260 bp, Glycine max
  Clone ID: 700908145H1
cggcaaggcaaatctgcattgcgatggcgcctccgaagctcttcgtctttgcgctttctgtaaccctaattttcgccatcgtaggggccgaagccgatatttccatcgaaggaagcactccagagccttatacctccgccatcaggatccaattagatcaactcaattccaagatccaaattctcgagtctcaaatcagcgaaaagttggaagaagtgaagaagaaggacgacattatggcagaaaaagaaaagtccatt

SEQ ID NO: 88330 - DNA, 268 bp, Glycine max
  Clone ID: 700908146H1
cactactttacagcacactcttgactcttaactctccctcccagtttcatggcttcttcagggacaagagcagcctcaggcttcagcttctcagagatctggctcttgatagtagccacagcactcatctgtggctttctcgggtacatagtttatgatgcaatcatggccactgcttctgagttgctgcaacgtttgctggtaatttctccactgttcttgatcatcattgttcactggctctccactgcaacccaaataagcttcc

SEQ ID NO: 88331 - DNA, 268 bp, Glycine max
  Clone ID: 700908147H1
ggagagggtatagcttcaaaggactcgtctctcggttcctcaggctctgataggctataggatttgctggcggtgattacaaatcacaagcatttatcatggtccttttcccatcttttgtgaatggattggtaagaactgtgtcaatcaagaaagagaagaattgtcaaaaggaggatggaagaaaagctgtggaagaattggcaaaggaagcaaggaagaatgaattgctattgagttcatctggagttgtgaagtcaaccaaggc

SEQ ID NO: 88332 - DNA, 178 bp, Glycine max
  Clone ID: 700908148H1
caggattttatgcctcagaacaagcagtgttatcactctatgctgtgggacgtatctcaggctgcactgttgatattggacatggaaaaataggtatccacacctgaatgcacttgtccatttcttgccattgtatataccttgtgccttgtgtattctagataacatttttttttac

SEQ ID NO: 88333 - DNA, 269 bp, Glycine max
  Clone ID: 700908150H1
acaaggcagaaagcaagctcatcctagagttttaaaaatggcagcagcctcctccatggctctctcttccccatccttggctggcaaggccgtgaagctgggcccatcagcccccgaagtcgggagggtcagcatgaggaagaccgtcaccaagcaggcctcctccggaagcccatggtacggcccagaccgcgtcaagtacttgggcccattctctggcgagcccccgtcctacctcactggcgagttcccaggtgactacggctggg

SEQ ID NO: 88334 - DNA, 265 bp, Glycine max
  Clone ID: 700908152H1
cttctcttaaaagagcctttgctttttctttaggcctttccgaattaagtacttgtttcattttctctcgaagcaagaaaaatgttcatcgagagtttcaaggttgagagtcctaacgtgaagtacacagagactgagattcagtccgtgtacaactatgaaaccactgaacttgttcacgagaacaagaatggcacttatcagtgggttgtcaagcccaaaactgtcaaatatgaatttgaaaccaacacccatgtccctaaac

SEQ ID NO: 88335 - DNA, 163 bp, Glycine max
  Clone ID: 700908154H1
aaaaacaaaattgatcatcttactgatgtattctccgaaaatggttgatttacattggagatcaaagatgccaagttccgacatgccttccaaaactctaaaactctctctctccgacaacaagtccttaccctctttgcaactacccttccgcaccacagat

SEQ ID NO: 88336 - DNA, 264 bp, Glycine max
  Clone ID: 700908156H1
cttcagagttggaaataccccagaagaaggagcataattcatcacttgtaaattaggttcttatgatgacaccaaccggcggagaaggagctgagaagatggatgcagaagatggtgtaaactgcagtgattatgagcatgacatagaaaatgaagaaagtggagggtactggtcagggatatatgacagacacatggctcatacaatgccacttcttatgaagagggctaacaccacctacccagattgctattgttggtgcc

SEQ ID NO: 88337 - DNA, 261 bp, Glycine max
  Clone ID: 700908158H1
ggcagtcaaggcttgaaagggtccataagtgatcagattagtcttttgtcagatttggaatttgagttctaatttgttcgtgggtgaaataccttctggacttggtcagaaatccctgatacacctggacttgtccaacaatcagttaacaggccccataccagatagtattgcctcttcaagtttgcagctcgtgctactgaatggtaacttattggaaggacgagtaccagagcaactttattcgattggtgtgcatgg

SEQ ID NO: 88338 - DNA, 263 bp, Glycine max
  Clone ID: 700908159H1
caaagaagaagataagctagctaaggcagcaatgggtaatccttctaagcttttcccatttttctttgcattcattgtgtttctgatgcccttagtttccttatcccacaatgacttctctacctttgccataaaaaccgtttcatacctagtttcctttagtgaaaatccaaaccataatggccacatcaccacaagctccaatgaaagagacaaatcacgtctttggaggaaagccttcattggcttacaaaatactcacg

SEQ ID NO: 88339 - DNA, 262 bp, Glycine max
  Clone ID: 700908160H1
gtggtggcaatgggtagcgaagaagagagggttcttgagaatcaactggaacttcaattgcaagagcaaagggattctctctctgctatcggtcaagctcttctctctgatccaactaaccctgaacttctggcggtacctctctctctctctctctcacccacacacacacacacatttcaatcaacaacatttgattttttcaataaccctttcaaatttctggccctgttcgatttcccatttcttaatcgcgtcagaa

SEQ ID NO: 88340 - DNA, 265 bp, Glycine max
  Clone ID: 700908161H1
cgtagtttccacatttctcctaccgcaaagtcaaaactacccactcacccaggtaggcacaggcagcgatggacgtaggagccggcgacgatcattccccggaagccgtcatatcgcggtggaaattcgcggtgtcgcagcagtaccagcacatgctggacaaaacgacgccgcacgttctccggcggtggatcgggtgcctggtggttgccgccgtgtacgtgctccgcgtgtacttggtccaaggcttctacatcgtctccta

SEQ ID NO: 88341 - DNA, 268 bp, Glycine max
  Clone ID: 700908164H1
ctcgagccgaatcggctcgagaatcaatcttctgagagtgtttgcgttgaaagtagcaaagatgtttcctttcgggcaaaagggtcaaaagataaaggggactatggtggttatgcagaagaatgtgttggatatcaacagcatcaccagtgttggagggatcgttgaccaaggcttagggctcataggcagtgcagtcgatgcacttacttttgcagccaccaaaatctccatccagttgattagtgctaccaaggctgatggtggg

SEQ ID NO: 88342 - DNA, 266 bp, Glycine max
  Clone ID: 700908165H1
catcttcttcccaaccactactactctctcactgcagatctcaattgcatcgctgtccatggctaccatcgttagcatcaaggcccgccagatcttcgacagtcgtggcaatccaactgtcgaggtggatttgacttgctccgatggtacttttgccagagctgctgttccaagtggtgcatccactgggatttatgaggcccttgaattgagagatggaggatctgactaccttggaaagggtgtatcaaaggctgttgacaatg

SEQ ID NO: 88343 - DNA, 268 bp, Glycine max
  Clone ID: 700908166H1
cttcccctatggctcgtcactccttgctcttagccctcctcctcatcgccgccgtggccaccgccgcgatggcggtggccgcgtaccgacgccgacgacatcctgatccgtcaggtggtgccagatgttggcgaagcgaagaggaggacaacctgctgaacgccgagcaccacttcgcgagcttcaaggccaagttcgccaagacctacgccaccaaggaggagcacgatcatcgcttcggcgtcttcaactccaacctccgcagagc

SEQ ID NO: 88344 - DNA, 264 bp, Glycine max
  Clone ID: 700908168H1
cttacgtagtgtacactatccagtggagcttgaatttgccaagggcaccgaggcagtggaaggaagacaatggcggtttctctatcggcgctcacaacctccctctcttcactttccttctcttcccacatttcccagagaccaaacactctctccttcgccagaaccgaatccctctccgtctccgtctcgcgcttccccaaaaccccctcctccctcgtcgtttccgccaccgcactcgcggaaccggaaaccgaagacctc

SEQ ID NO: 88345 - DNA, 145 bp, Glycine max
  Clone ID: 700908169H1
cgtggacgccataatggaaaccggaggcagaacactgaaaagcagagaaacgatggcctttgaatcggtgacgcagtcagcacctcctccgagatcaagaggaagaatcaccttgctcgaaaaccccaaaacacccttcgccctt

SEQ ID NO: 88346 - DNA, 262 bp, Glycine max
  Clone ID: 700908170H1
agaaagagtaataataataaagtggaagaaaaagaattaggagagtgaaacaagaagaagaagaagaagaagaagaagaagaagaattgagaagatggtgtttgaggaaactgagctgaggctgggactgggactatgtctccctggaaatggaaccacggcaacaactgaagctgctgctgcggaattaggagtgaggaagagagggttctctgagactgaaactgatgaaacagccaccgttgatttgatgcttaacctc

SEQ ID NO: 88347 - DNA, 258 bp, Glycine max
  Clone ID: 700908171H1
ggccaatcaactcacaatggtcagcttaatggaattcaatgcaataatttagttgaatcaatctatatgaattcttcatgtgacatgctgggaaatatagtgcactcgttaaagattgaaggtccatattctggtgtctgtccatccaatggatctttaccttgtataaggtattcagtttctttggctgtagagggtgagaatctgaaagaagttattgaagtttgtgatgagtttgagtttgaagtgggaattggt

SEQ ID NO: 88348 - DNA, 262 bp, Glycine max
  Clone ID: 700908172H1
ctcgagcgattcggctcgagaaaaaatgtcatccactgctagcatcgggttatggggctccaacctgcttcaacaacgttacatcacacaaagaagcagcaagcaatgaggaacagcttcttgagcaataagcacaacagtgtgagagtgatgaagggttggagaggaagacatggtaacactaacaacacatccaaaagggtaggaattgtgcagtgtagagggttaggggacttcataggtggagacttgataaagtttg

SEQ ID NO: 88349 - DNA, 261 bp, Glycine max
  unsure (1)..(261): unsure at all n locations
  Clone ID: 700908173H1
agcaaacagcaaatgtccgatcattatgggacatgggcttacaacttttccacacaacatacgaatttgaaatactnaagtagaacacaaaactgttacaggtcttctacgaattattaaaagtgatagaaaaggtgaagcagtggatagaactctttaagtccaccttttgaagatgtttactgctctgggaatttatgcagaaagctttgagaagccatccttgaatgcacatctgaatttgatgctgctgaaggtgtg

SEQ ID NO: 88350 - DNA, 261 bp, Glycine max
  Clone ID: 700908174H1
caacgcacgaggttgaagttaccgcgccggcttccgctgttcttgcgccaccgggtttctatctgactgtttgtggtccatcaagaagttccaagccacggtatttgggtccagatggtgtgaaattgtgaattctcgtctctgcctgctcgacaacttcgttcgtatatgttctttttattcaagttatttattgttgtgaatgtctgggagtgaacagattcttgagtgagtatttaaactgtaagatatgggaagata

SEQ ID NO: 88351 - DNA, 261 bp, Glycine max
  Clone ID: 700908176H1
cggaaagagagagagaagctagagagagaaagagaccaaactaattagtgtagaagaaacagagacgctgtgtgggtgtgggtgtgggtgtgggagagagagggagagagaaagcagagaaaatccgaagcagttttctcacactttttgatcggaacctctcattccgcgttcagattgcgccccccatttggtccttacaatggagcggttagggcgggccagcgaagggtcgcagtctgatccgtcgccggaatggac

SEQ ID NO: 88352 - DNA, 258 bp, Glycine max
  Clone ID: 700908177H1
ctcccaactcgccctcgactcacatccttgtccgattccgcgaactagtcgagtcaatcgggttggtaaggtaagatctattctgtttcttcgtcatggcaaccggacaactattctcgcgtactacacaggctttgttttacaactaccagcaacttcccatccagcggatgcttgattttgacttcctttgcggcagggaaacaccatcagttgctggaataattaaccctggttctgagggatttcaaatacttt

SEQ ID NO: 88353 - DNA, 263 bp, Glycine max
  Clone ID: 700908179H1
gacaaaatttaataatgtctatgtgaaaaacttatcagagtcaaccacggatgaagagttgatgataaattttggagaatatggtaccattactagtgctttaataatgagagatgctgatggtaaatcaaggtgttttggctttgtcaattttgaaaacccagacgatgctgccaaagctgttgagggacttaatgggaagaaatttgatgataaggaatggtatgttggaaaagcccagaaaaaatctgagcgtgaacaag

SEQ ID NO: 88354 - DNA, 263 bp, Glycine max
  Clone ID: 700908180H1
tctctccccatcttttattgaattgattccaaatacaaacatggcactgaagaagttcttgtgggttgttctgtccctttctttggtccttggagtggccaatagctttgattttcacgacaaggatttggagtccgaggaaagcctgtgggacttgtacgagagatggaggagtcaccacacggtttcgcgaaccttggtgacaagcacaagcggtttaacgtgttcaaagcgaatgtgatgcatgtccataacaccaacaa

SEQ ID NO: 88355 - DNA, 259 bp, Glycine max
  Clone ID: 700908182H1
cacctttgtaaatacaattgggacactactaggattgggaagaagggtctttacatttatagtttggcaaatagatattgcaactacctttgtataattctatttctgaagaagcaattacaatttacaagggatggtgccatttacggcataaggattaaggagggataaagggaccaattgctttggaatatccactcattacaatgcatgtatgacaacacatagtaatatgatgtgtgtttttattcagtgggca

SEQ ID NO: 88356 - DNA, 262 bp, Glycine max
  Clone ID: 700908183H1
gaaaaatagaaaagcgaggagccaggtgatgctaatgtgaaaagaggagcagaatctcggccatgtccacgtcaccgtccggcagtaccctcggtaaggccacggcggtgatgaagagcctcaacttctacctttcagatcaccccgcaatcgtgactttcagatggagtcacgacctatgctggggttccacctggtccttcctcttctcctcaatcgcctcttacgtcgtcgtttcgatcttcctccacctcacattagc

SEQ ID NO: 88357 - DNA, 197 bp, Glycine max
  Clone ID: 700908184H1
ttaaggctggtgtctatgacgagtacatcaccgttcccaagagttcaaagaacattctcatgtacggtgatggccctgctaagaccatcatcaccggtcgcaagaacttcgtcgatggtgtcaagaccatgcaaactgccactttcgccaacactgcagaagggttcattgccaaggcaatgacattccagaacact

SEQ ID NO: 88358 - DNA, 256 bp, Glycine max
  Clone ID: 700908185H1
tagtgacactgtttggtagcattcatgagatgctccccgagacaggagcaggaggaagcatgcgaagactctgtttccaaattttggaagcatgttcagcacagctgagccgcatgttaaaaatgaacagtgggatgaagagagcttacaaagggaaggtgaggactacatgtcagatgcagctgatggggactctgatgataatttgcatagtcctttaatctcacgtcaaacaacaagccttgaaaaagacttg

SEQ ID NO: 88359 - DNA, 258 bp, Glycine max
  Clone ID: 700908186H1
cttcaatctcatctccgatctcaaaatgcccgctgtttatggagctcgcttgaccaccttcgaagactccgagaaggagagtgaatacggttacgttcgcaaggtttcaggacccgtcgtcgttgcggatggcatggctggtgctgctatgtatgaactcgtgcgtgttggtcatgataatctctgtggtgaaattattcgtctcgaaggggattctgctaccatccaagtttatgaggaaactgctggtttgatggt

SEQ ID NO: 88360 - DNA, 258 bp, Glycine max
  Clone ID: 700908188H1
gctaggatggttcgtgaactatttcagatggctcgttcaaagaaggcatgcattgtgttttttgatgaagttgatgcaattggaggtgcacgatttgatgatggcgttggtggtgacaatgaggttcagcgcaccatgcttgaaattgtgaatcagcttgatgggtttgatgctcggggaaacatcaaagttttgatggcaactaattggcctgacactctagatccagcactactgcggcctgggcgattggaccgt

SEQ ID NO: 88361 - DNA, 240 bp, Glycine max
  Clone ID: 700908192H1
cgagtgtctaatgtaaatgatcgagttatgttgggtgacaacacattcaggagtggacaaactgaaatgtcaatggagatgactcagggtcctcggggtcattacgacaattttcttctacaaccatcacttgttgaggatgcacttgcaatcagaatatgttgagacgaatatcacctgtcagatttccatactgactacgaaattgctaaatgttaagtgattagaatcttgcaatga

SEQ ID NO: 88362 - DNA, 260 bp, Glycine max
  Clone ID: 700908193H1
ctccacctggccgcacaggccggcgtccgctacgccatgcagaacccccaatcctacgtcaccgccaacatcgctggcttcgtcaaccttctcgaggctgccaaatccgccaacccccaacccgccattgtctgggcttcgtccagctccgtctacggcctcaacacccaaaaccctttctccgagctccaccgcaccgaccagcccgccagcctctacgccgccaccaagaaggccggcgaggaaatcgcccacaccta

SEQ ID NO: 88363 - DNA, 260 bp, Glycine max
  Clone ID: 700908194H1
ggatcaacacgtatcccagctgttcaggagcttgtaaagaagttgactggcaaggacccaaatgtcactgtcaatccagatgaagtggttgcccttggagctgcagttcaggctggtgtcttggctggagatgtcagtgatattgtgctgttggatgtcactccattatctttgggtctggaaactctaggtggtgtgatgacaaaaattattccaagaaacactactcttcccacctcaaagtccgaggttttctcaac

SEQ ID NO: 88364 - DNA, 263 bp, Glycine max
  Clone ID: 700908195H1
agctaatgataatcttattgaagatcttccctctttggtgtgcaatctttctcacttgaagtcactttgcttggataacaataatgtgaagcagatacctctgaatttattgaaagactgcattgctcttcagaacatatcactgcatggtaatcctatatcaatggatcaatttcagcagatggaggggtttcaagagtttgaagcaaggaggaaaaagaagtttgacaaacaaattgattcaaatgtgatgatcggttcca

SEQ ID NO: 88365 - DNA, 273 bp, Glycine max
  Clone ID: 700908201H1
ttctgcagttggtgactgcttatatctataatagatgacttgaactatccggaaaaggcagacacatactatattggtaatgcaccatatgtattctcagcgtgttggaaggtttgtgcataccttctgatgtttgaagagtttggactgcttcacttgcatccttaatttcataaacatcgttcagatcccaagatgaacagctcaaatatcttttcttcaataatatgtggaaggttgtgaagcctcttttgcaataaagaaccaggagaa

SEQ ID NO: 88366 - DNA, 273 bp, Glycine max
  Clone ID: 700908204H1
cagtaggggtcccaagtggaatgtattgtttctacctatcgcatgcatccgttttgtcttcttcttattttagatgtggtgttgtgaaatctaatggcatgcttagaaatgtacaacaactcagagacaacaagaacaacaagggtgataatcatcaccatcatcatcaatgcgctccaatgagcccaagaatctctttctcaaatgattttgtggatgtgcaacaagccatgaagctgcaagaacaaagaggtggctcatccagatcagaca

SEQ ID NO: 88367 - DNA, 267 bp, Glycine max
  Clone ID: 700908205H1
ttttccctcgttgaaatgaaaatgggttcttctttgtggactttgtgtctaattttggcttcactagcctcttctgcattctgtgcctttccacggaggccagtggatgttccattcggcagaactacgttcccacttgggcttttgatcacattcaatacttcaatggaaggtctgagattcaacttcatcttgacaagtacactggtactggcttccagtccaaagggtcatacttgtttggtcacttcagcatgaacataaaga

SEQ ID NO: 88368 - DNA, 267 bp, Glycine max
  Clone ID: 700908206H1
cttttcttgtttcatttctcgctttatccttagtttttgttcttcaacggatgaaggaatcatcttgatcgtacggaacttgttctatctttccgtaatcgaacttggtggccactgtatataataagttcagttcaacaacacaatcattttgtatatgatcaaattaagtgatggggggcatctgttctaggaagagagatgagcatgagcatgttgtggaagatgaattacacagaggagtctcggggaggtattgtaggagtg

SEQ ID NO: 88369 - DNA, 265 bp, Glycine max
  Clone ID: 700908208H1
tgttaatggcaactcttggcttgcaagcagttcgtcctcctccattaacgtccacttccgacccaacacctctttttgatggcaccaccaggttgtacatcagttattcctgtccctatgccaacgagtatggataactaggaactacaaggggcttcaagacaagatcaaattggtccctattgatcttcaagacaggccagcttggtataaggagaaagtctaccctgaaaataaggtgccatccttggagcacaatggcaag

SEQ ID NO: 88370 - DNA, 262 bp, Glycine max
  Clone ID: 700908210H1
gtagtattatttcattgatttctccctcttcgctctctctcagtgaccagagacagatgatgatggagatggcgaacgaaacgctgtcgttgcggcactcgcggcgttggtgctactcgggcgagtgtggcggtggatgctcaggagaactcggacgtgaagacgctggtgaagtacaagcacgggaagaagtactgcgacaaaggatgggaatgtaagggctggtcaatttactgttgtaacctcaccattaccgattatt

SEQ ID NO: 88371 - DNA, 262 bp, Glycine max
  Clone ID: 700908211H1
gctcaacgtcgctgataatctcatctccgggcccattccgagaaacttcggttctctcagcatgctgagccgggccttgctcagcggacacaggctaagtggggccatcccgagctcggttctcagatttaccgtctggcggatctggatctgtctcgtaaccagatttctgggcccattccgtagtagctgtgtaaaatggtggttttatcgacactaaacttcaatttgatgaaattcttcacattaagggggcaatgcg

SEQ ID NO: 88372 - DNA, 257 bp, Glycine max
  Clone ID: 700908212H1
ctctttctctctctttctaaaaaccagaaacaacaaacacaaaccgaaaaggcgaaaggggttttccgagtgagatctagggtttccatcgattcggagagaggatattgatagaacgacccaacgagcaaggtcaggaggtggagtactagaacatggattcggtgccttcgaattcgcatggaaacctcgatgagcagatttctcagctcatgcagtgcaaaccctggtccgagtatgacgtacagctcttgtcc

SEQ ID NO: 88373 - DNA, 177 bp, Glycine max
  Clone ID: 700908213H1
gtttagaacaggcctgtcttctcttaaacgaggttgtgttgtttggttttgaatttgaagtgatttgatgatggagatgaatatattggcttcttcgttctctggttatgcaaaacccttttaagagtaaacccttctcttcttacgctcagggcatcttctctgcgccatgactac

SEQ ID NO: 88374 - DNA, 264 bp, Glycine max
  Clone ID: 700908215H1
gaaaaacagagaaagcgacagggcagagaaaaagaggttccaaagcagccaccataacagtgaatacacatagttacaaaacaagcataaggtaaaatttacctagaaaaaggtcttcgatctcgtggcataaacattaaacaaaagggtgttctatgttttaattattgcaattggggttaattgttttatagagatttccgcctgtttcaatccgtgtaccaaggtagccacttttttccttttcttttgtttttcctgtta

SEQ ID NO: 88375 - DNA, 123 bp, Glycine max
  Clone ID: 700908217H1
attggtataggcgtgccaaggtcttgttaattttgagcgttaagtgctgcaactaatcagatcccaagaccttggcctaccttgccatacagagaaaagataagccaaatataagccaagttt

SEQ ID NO: 88376 - DNA, 267 bp, Glycine max
  Clone ID: 700908219H1
ctcacttgccttatttttggtcttgagattgagctaaaggccaactcaaccatcgaatttgttggtgattgaaagagaaggaagaagaagcaggaaatggaagcagtgagagctggtcgaaaggagcaataggtctaggtcaaggtgatggcgtagctaaggacagcactgagactgaactcaccagaatccgtctcctcagggcaattgttgagacccgtgatccctcttccaaggaagaggatgattttatgattagaagattcc

SEQ ID NO: 88377 - DNA, 266 bp, Glycine max
  Clone ID: 700908220H1
atctttgctattacctctttttccaaactctaaaaatttttagttccacaaaaccaaaccaaaatggcagcagcctcggcctcatccaccatgatatcaacaccagccttatctccaagccaagcatccaaaagcaccatcatttgaagccatccaacgtgtgctttcaaggccttagacccctcacaaggttcacaaccaaagtgagcagcaccaccagaagggttattccaaagggtggtgtcggtgttagagctgaactcaac

SEQ ID NO: 88378 - DNA, 255 bp, Glycine max
  Clone ID: 700908222H1
gttttcttgcaaaaaaaaaaaactcttaattggatagaatcagcccccaaagtgctcctaccacagttacaaggcctcattttctatgagaagctgagacttatgtgaagccacatcttgtaaggaacaaaatgtcttccaagggagacaggccaagaattgcttgccaaaagggtttaggcataactcagctccaggcggattcgtgaactatgacacgctaggctctagtgggtgttccggaatgcgttcgga

SEQ ID NO: 88379 - DNA, 265 bp, Glycine max
  Clone ID: 700908224H1
tcgtaactcgcacatagtatccctcagtcattccgtgtccatagttgcaagttatctaagcccagtttgtgtatccctcacacaccgtttccagtaacaacacaacatcatgctttctcgccctcacatcaatttttctgtttctgagatccgcgccttctcttcactttcagatggttctgtctctgtagctcggaatcagacgacaggagaatttgctgggggagagtttcaatttttcaaatcctgtcgttgattcatttgg

SEQ ID NO: 88380 - DNA, 262 bp, Glycine max
  Clone ID: 700908226H1
ggaactgagcaagcattggttgctgaattgagtgccttggatgaacatctcaagacccatggtccatacattgctggggagaaagtcactgctgttgatctgagtttggcaccgaaacgtaccatcttgtggtagcgctgggctcacttcaagaattgccgtattccaggaactttggtacatttggcatggcactgtaagctcctggtctttgggtcatttctcggagcagattccatcatacctgaccggagaattccct

SEQ ID NO: 88381 - DNA, 259 bp, Glycine max
  Clone ID: 700908227H1
gtttctgactcagagaaccaagagcaagtttgtgatctctaaggaaggaaatgctgccgagacactctacaaatttatgagacctgaagacattcctgttcagtatggaggactgaatggcccagtgatttgcagaatggtcccccaaaacctgcatctgagttcacaatcaaaggaggagagaaagtgaacatacaaatagaaggaattgaggctggtgcaactatcacatgggacattgtagtgggagggtgggact

SEQ ID NO: 88382 - DNA, 261 bp, Glycine max
  Clone ID: 700908228H1
cttgtgggtggaggaaggaacgagaaatgaaagaaacatttgttgtgtctgtgtgtgtgggtgggtggtacttagccaattgtgagcaaataacaaacgagtggctttcccttcttctatcctatatataccattcccatcactccccatgccctctcaattcacttcctatccccttctctgattctctccatatattatctcaaacccctctcacagaatgggaagtgctggaggaactgactatggtgcatacactta

SEQ ID NO: 88383 - DNA, 264 bp, Glycine max
  Clone ID: 700908229H1
agagaacccttccgacagactctttactctcgttcacagcataaaaacagcaccgctttacaaatgacaccactattattgtgagataacggccattattcttcttccgaccatccccagaatgcttttctcacccttcctcactctcactttcttcctcctcttctcttcttccgttgctgcgatttactcagcggcaacatgttctaacatagtgccgctgagataccgcagcgacagaatctccataacggacttcggtgg

SEQ ID NO: 88384 - DNA, 259 bp, Glycine max
  Clone ID: 700908230H1
aagatggcttcctttgtatccttcctagtgctgcttcttgcagcccttatcctcatgcctcaagggcttgctacttactacaaaccaattaagaagccaccagtgtacaagcctccagttacaagccaccagtgtacaaaccaccggtttataagccaaaaccaccggtttacaagccgaaaccaccggtttacaagccaccatataagaagccaccatacaagaaaccactatatggagagtatctccagtagaggac

SEQ ID NO: 88385 - DNA, 265 bp, Glycine max
  Clone ID: 700908231H1
aagcattgtctggccacaaggatgaggccttcttctctggtaatgctgctgctctggcttcaaggaagtcttctccaagagtgaccaacgaggctgttcagaaggctgctgctgcattgagggttcagatcatcgccgtgcaacaaatgtcagtgccagactggattctcaacaaaagaagctcaaccttccaatcctgccaaccaccactattggatccttccctcagactgtagaactgaggagggtacgccgtgaattcaag

SEQ ID NO: 88386 - DNA, 266 bp, Glycine max
  Clone ID: 700908232H1
attcaaatccaaatggccctttacattacactaataattggcctcctagtaaacaccctagtactctataaatagcatttgcatgcaccttagtcttcaccaaaatactcctcttggcatttgtgttgtgtccctcttttaagctatttccttctcttaacacaattggttgtgccaattgccatagtcaccaaccaattaacaaaggtatatatatcatcatatcatcaccaaatgaaaaatattgggttgttttttcttgtggt

SEQ ID NO: 88387 - DNA, 267 bp, Glycine max
  Clone ID: 700908234H1
aaacaatggctcaaccctcaccggtggtgttattgctaaccgagagggtatttcatgggcaacaaaggacaagattcaacaagccaattactttgggtcgctgacccaggcatcagctattgagttgggtctttccaaggggaggaaatatatgccccattcaagagcctgcttccaatggtaaaccctgatgatgttgtgtttgggggatgggatatcagtaacttgaacctggcagatgccatggccagggccaaggtgtttgat

SEQ ID NO: 88388 - DNA, 267 bp, Glycine max
  Clone ID: 700908235H1
ctggcgaggaaggagaatccaaagtaaccgagcaccataccagacacaagactgccaaatccaacgcaaataagaacaacagagaaacctctgcggacacttccaaaggctccgaggttaaaatcagaaaccagactacattcatgtccgagcgcgtcgtggacaagccacggatagtcatagcttagctgaaagagtaaggagggagaagattagcgagagaatgaagtatttgcaagatttaataccgggttgcaacaaagttgc

SEQ ID NO: 88389 - DNA, 260 bp, Glycine max
  Clone ID: 700908237H1
cgcaatcgcaatccagcgaatatgaaggtcgtcgctgcatacttgctcgcagtgttgggagggaatccttccccttctgccgatgacatcaaacacatcctcggcgcagttggagctgggctgagaatgagttgattgagttgctcttgactgaagtcaagggaaaagacttcaatgagctaattgctagtggaagtgaaaagatgtctgcagtgtctggtggcggtgcagcggttgccgttgctgctgcaccagctgga

SEQ ID NO: 88390 - DNA, 263 bp, Glycine max
  Clone ID: 700908239H1
ggcacacttacgttttggccacaccgaagcgcaaccgttccgatgacgtggacggcggctaggcgaagaagctgctgttgcagcacggcgaggcagacccggcggcggcgctggcgaggcgcggcacgagttcggggaccacggcggggtgaacatgtcgatcgaggcgtcggcgacgttcacggtgatggagccggagacgatgcggcgcatgttcgccggtgaactcggccccgaccgcgacttcttcatctacagccgcc

SEQ ID NO: 88391 - DNA, 262 bp, Glycine max
  Clone ID: 700908240H1
gtgaaaccccaatcccaatacactcccaactcacaaagccatgtctccaggtcctgttgtcgacgcttcccctgaggttgaagcagagcaacaacttccctccgtcgatgacgcaaccagttgaagaaatcccaaccgcaggaggatgatgctcccgttgtcgaggacgtgagggatgatgacaaggacgacgacgatgaggacgacgacgacgatgatgaagatgacaaggaatacgatgctctaggtggtgctgagggtt

SEQ ID NO: 88392 - DNA, 259 bp, Glycine max
  Clone ID: 700908242H1
ctcctcagctgtgtgatgattcatttctaaaccctaattctccttgtttccattgctgcttcattgttttttaagcaattccgagcattgatcaaatgggttttggttcacttccattttctgaaacagcgtactctcaaaaaaaatatctgatcacattttctacttctgcaaattctgcatttttttccctctctttctttctggggtgtctgcagaacaagggaatctcacagattccttgtgtttctctttggtt

SEQ ID NO: 88393 - DNA, 260 bp, Glycine max
  Clone ID: 700908243H1
caattacagaggctaagacctcaactacaaatagtgctaggcttcatgtcagttctcactcgtgaagttaaggaagttggccatggtgggaaagaggtgactagggcggtgccagcgtatcagaaaaagtgaaggattctcttgtgaagaacattagaagatgaatgaccccccaacccttgaaaattagggcagatattgaaatgaaatgaaatgtttccaggttccaagaaaacttgcacagtggatgcatctctaca

SEQ ID NO: 88394 - DNA, 257 bp, Glycine max
  Clone ID: 700908244H1
gtctcgtttcaaatattaattttaggttcttcgttacgcgttgtgttgcgttgtgcgtgagaaagtgcgcgtggtgaaaaagcatggcttctcagctcctgagacgaaccttcggagtcgtttccttgcaaaccctagggccttctcctccgctgcttccactccgatccgcgccactcttttccccggcgacggcatcggccccgagatcgccgattccgtcaaacagatattccaagcagctgatgtcccaatag

SEQ ID NO: 88395 - DNA, 259 bp, Glycine max
  Clone ID: 700908245H1
cagaaccaacaatgtcgttccccttcaaccactctcaccgcagggacgacgacgacgacgacaaacgacccgccgtttaccctcctccgggtaacaccttcaacaaccctccaccaccttctacggcgtccatcagccagaaacccacgtgtcccatgtcttcaacaacagcaactactccgctcccccgcatccaccaccttcccataaccaccaccatgactccttcactcacggaggcggcagcaccgtgcaccac

SEQ ID NO: 88396 - DNA, 248 bp, Glycine max
  Clone ID: 700908246H1
gtggtttcaacagtgaggcaattcctgaagcaaaggatgttgtaagaatcgatttggtgggaggctttgctttgcaaaaggtgacatcagaaagaagttactttcggacaatagcaatatggatataaaactgaattttgtgcctccatcccttataaactttatttcaagacagctcattggcaatggtttcagactctatcagaagactgtgtcttctatgatatggcccagtttgcggaaatcca

SEQ ID NO: 88397 - DNA, 240 bp, Glycine max
  Clone ID: 700908247H1
agctgatggaatactaatatggtctgcaatagaagactgggttcgaacctatgtgaaccattactaccctcactcaagccttatatgcaatgacaaagagctacaatcttggtactcgagtcaatcaatgtaggccatgcggatcttaggcacgaaaattggtggccaacattgaacaatagtgaggatcttgtgtccattctttccacattgatttggacttgatctgcacaacatgct

SEQ ID NO: 88398 - DNA, 261 bp, Glycine max
  Clone ID: 700908248H1
cacgtttcccttttctttctgttgagaacccctgctattcttccactcaggggtcccactcgttggtaggagaataggtggtgtttccggcaacgtgcttttttggacacaaaccttcgccggaaccctgaattaagcacttaatgtgaattctgagatacaataacaataacaatgtcttctcctcataactcttctcctgatgactctagccctgataatgcaacacctgataactccacccctgatgactctgacaac

SEQ ID NO: 88399 - DNA, 263 bp, Glycine max
  Clone ID: 700908250H1
cgctgctgccgaaacccttcccgatccctaaggtaagtgagtaatcggtggttgagaatggtggagaaggcgaagggtaggaaggaggaggtggttaccagagagtacaccattaactccacaagcgcctccatggctgcacatttaagaagaaagctcctaaagctattaaggagataaggaaatttgcccaaaaggccatggggaccaatgatgtgagggtggatgtgaagttgaacaagtttgtctggagccagggaatc

SEQ ID NO: 88400 - DNA, 139 bp, Glycine max
  Clone ID: 700908251H1
ctagttctagatcgcgagctgccgcctttttttttttttttctaccgaggaaaggaaagaattggaaaagggggaaaaaaccacggggcccaagattccctcttctctgcttgggaaaaagagaaaacaaacaaaccat

SEQ ID NO: 88401 - DNA, 261 bp, Glycine max
  Clone ID: 700908252H1
ccagcaccagcacctgcacctgcagcagcagcagcaccagcacctgcaccagcaccagcaccagcaccagctgataagcaaattccagctggaattcctggaagtctcaaaaacaataccatcgcgctgatgggcaaaactgtggcaactttctcactgatcggccatctaccaaggttcatgctgccccgggtggtggatcttccttgcattacctctttggtggtcctccagggaactgattcatacctaccatgtgat

SEQ ID NO: 88402 - DNA, 261 bp, Glycine max
  Clone ID: 700908253H1
ggaaatgggtgtgaagatgtattctgacatggtcactcttcaaactatggacagcatattctatgaagtgcagtcgcaaggtagactttccttctacctcacccaaatgggggaaaagcagttaacattgcatctgctgctgcactttctcctgatgacatcatattgcctcagtaccgagagcctggagttctattgtggcgtggttttacactgcagcaatttgttcatcagtgctttggaaacacacatgattttgga

SEQ ID NO: 88403 - DNA, 260 bp, Glycine max
  Clone ID: 700908254H1
attaatttatcttctcccatctaaaatctatatataatatattacatctgaggttcaattttcctaagctcacatttcctttgtgtttgtgagtaatttgcaaacacaccaaaacatctctctctctctctctctctccaattcagacccctagttctgttggatcttgcatatagtaaccctttattgattcgcaaagatgaaggtcacagtggtttctcggagtggaagagaagtggttaaaggtggcattgagctca

SEQ ID NO: 88404 - DNA, 261 bp, Glycine max
  Clone ID: 700908255H1
attgcatttgcattaccattcacaatggcaatctcctccacttccaactccctcattcccaccaaatctctaatcccccaatcccaccccctcattcccaacaccaggcccgcccccggcccaagcccggcccatccccttccatcttcgccgttcacgccgccgagcccgccaaaaaccccgtcgtcaccgacaagcccaagccccaagcccaacaacctcccccggcctcggcccgggcaacgaaatgggccgtggaca

SEQ ID NO: 88405 - DNA, 261 bp, Glycine max
  Clone ID: 700908256H1
ctctttttcatttcccacttcctcaccaaatccaactactccctctttcttcttccacactgtcattcacatatctctctctctctctctctctcgctgttattcaatttattatatttctctttctgatcgtgtcttattctgccttctctccactttcgattgtgaagctccgtgtcaattggatacctgccactgtcttttcctttttgcaaaaagttattccaggagattgcttctaaatatcagttgcaatgcgtg

SEQ ID NO: 88406 - DNA, 237 bp, Glycine max
  Clone ID: 700908258H1
aaagaaaaaaaaaaacccttagccaacacaaccatcatggccacctctgctattcagcaatcagcattcactggtcaaactgctctgaagcagctcaatgagttcgtccgcaagccggtggcgccggcaaaggtcgcactaacatgcgccgcaccgtcaagagtgctcctcagagcatttggtatggccctgaccgtcccaagtacttgggtccattctcggagcacgttccatcat

SEQ ID NO: 88407 - DNA, 254 bp, Glycine max
  Clone ID: 700908259H1
gttccaagtctgccttatctgctgttctagtttattggcattgggatcagtaactgcaattcccaatgcaaattttcatcgggcgccaaggagcactagtgtgcttctggttgtgtctgtgttttttgtggtaacaggattcaacaatgaagagcacaggacagtggaggtagttggcctaggagaatgcgcagactgcaggcagaacaatattaagaataaccacgctttctcagggttacgtgtgacggtag

SEQ ID NO: 88408 - DNA, 255 bp, Glycine max
  Clone ID: 700907485H1
cataaatctagctccaattcctaatcacctggttaatttcttcacatagagctatcaagatccaacgttaacatgaagaatgttttagtaaggtcagctgcgcgagctctgcttgagcggcggtgggcggagctactaccgccagctctcaacggcggcgatcgtggaacagatacaccagcacggtggcggcgcgtttggaagcttccacttgcggaggatgtccactcttccagaggtaaaggatcagcactc

SEQ ID NO: 88409 - DNA, 242 bp, Glycine max
  Clone ID: 700907486H1
cgacttgactcctcttcctcggttagctccctcggtccttctctctcgcgaggctatgccaggaatgcccgcggaacagtggcagtgcacgacacgactggcggagctgtcatatcgctggtacaagccactgcatgtagcggtgctccacaagctccctcgagacccctatgatcttcgcgaggactccctcgtcgtatcctcagtgtgccgcgcttgcgtactgcagagtcctctcgctc

SEQ ID NO: 88410 - DNA, 254 bp, Glycine max
  Clone ID: 700907487H1
aactgtttgaaagagccatgcaagagacgtaatctgcaggaaggagcaatgaatgctagagcatgggcttccaagtcccttgccaccgtttcaattggagaggaaagcagcagccgtgggatgcatctgtgagttgactgtactgtgcaatttttcttgaaattggagattagaatataacctataaaaggcttggctgcaagttatgccatgtagttttgtttcaggatcatcttcacaccctctggcctcgt

SEQ ID NO: 88411 - DNA, 254 bp, Glycine max
  Clone ID: 700907489H1
gttgctttcatgggaaagcttcacctgacggaatctcctcctaaaaatatctcattggaagtggttgttgagcctcagcaacaaaatcctaagcggaaaaacgattctgaaaagctaaaccataaaacagaatgttcagctgagaatgcagttgcaaaaagaacatctttttcgtccccgaaaaatggtagccaccttgcaaatcacacccccttttcaggaactccacaccaagcaaatgtagcttctgataa

SEQ ID NO: 88412 - DNA, 154 bp, Glycine max
  Clone ID: 700907490H1
ttgtgttattgggtggagtgtgagaatccaaatatctgtatctatcgatctccctctgcagttatccatattgtggggcgcatttgagcaacaatggtgcacacaacagcagagcctaaggagggagagtcgatcgggaaactaacggcggaag

SEQ ID NO: 88413 - DNA, 248 bp, Glycine max
  Clone ID: 700907491H1
atcacaaccaaggagcttggaactgttatgcgttcattggggcaaaacccaactgaggcagagctccaggacatgatcaatgaagtggatgctgatgggaatggtaccatcgacttccctgagttcctaaatctcatggccaggaagatgaaggacactgattctgaggaggagctgaaagaggcattccgggttttcgacaaggaccagaatgggttcatctctgctgctgagctccgccatgtgat

SEQ ID NO: 88414 - DNA, 163 bp, Glycine max
  Clone ID: 700907493H1
gtacgcacgcacttcagttcgagcgaagatccatagaaggttgaatataatagtcagacatcatgttacacagtataatcttgtgagatatcatttcggggattaagtttgtgaaggagaaaaagctgataacagatgttctattcttgttctgatttgcttg

SEQ ID NO: 88415 - DNA, 124 bp, Glycine max
  Clone ID: 700907494H1
tgcatcagctgagggtaccaagtgatatgctgccagacgttaacccagggcctgctgaggaccagacgcaatcgacgtccgctgacactgttcacgcagacggtgctaataccgatccgtttgc

SEQ ID NO: 88416 - DNA, 261 bp, Glycine max
  Clone ID: 700907496H1
gtaacaattcctcaatacttatttcttcttggacttaaatatacgtctgccacattctcatgtgcgttcctcaacatggtgcctgtatttacgttcattatggcagtgccatttgggtaagttaaacaaaaggatattaaattgattgtggaatacaagaacaataatttttatcctttgggttgaaattttactaggatagagaaggtgaacgtgcaaagcaagagtggtaaagccaaagtcatgggaacttttgtgtgc

SEQ ID NO: 88417 - DNA, 258 bp, Glycine max
  Clone ID: 700907504H1
ttcaactttcaagtgttcaaatgggggcaatttcaacaccccttgtgttggttcttctattttgctgcctggtttctgtttcacaagcagaatacttgaagtacaaagacccaaaacggccactgaatgttagaatcaaggacttgttgaagcgaatgaccctggaggagaagataggccaaatggtgcagattgaacgaagtggtgccacccctcaagtgatgaagaagtacttcattgggagtgtgctgagtgggg

SEQ ID NO: 88418 - DNA, 258 bp, Glycine max
  Clone ID: 700907505H1
gtttttctctctttcacttatttattgactctccataagcccttcaaacctctctctattcctctctactagtcaccttctcccttccattcactccacttcttaacacccccaaacagaacaacggcagagcaagcagccagaaaaatggtgttgctgtccaaagcaacaacagaacaatactcctacatcaagaactacatgccaactgcattctcctcaacaattcccatagtggacctctccaaacccgatgca

SEQ ID NO: 88419 - DNA, 254 bp, Glycine max
  Clone ID: 700907506H1
cttctcttcactctttttaaaaaaaatggttctcaccatttccacattagacacacataaaaccattcccaatagccgcctctgataattgattactatcaacccaacttcaagttgtgttcttttgtggtgtgtaaccgtattctgtatttgttttcatcaattggaaactgggttttctcgctttttgcagataagcatcaataggatactagatcatggattggtactatgggaacggcattaatgattat

SEQ ID NO: 88420 - DNA, 253 bp, Glycine max
  Clone ID: 700907507H1
gttggaatgctggttgctttacttctaggtttaaatatgtcatggactgcaattactgctgcacttgctctcatagttcttgatttcaaagatgctacaccatgtttagagaaggtttcgtattcacttttgatattcttttgtggaatgtttattacagtggatggcctcaataaaactggaattccaagtgctctgtgggacataatggagccctattctcatgttgatcgtgctagtggaattgcaatac

SEQ ID NO: 88421 - DNA, 255 bp, Glycine max
  Clone ID: 700907509H1
ggaaaatatctggctagtggtggtgaggatggtatggtacgtgtgtggaaagtggttgaggatgagagatcaagtgaattggacattctggacgatgatgcgtcaattatatatttcaaaataaataatttttcatgcgttgctccccttgatgtagataaagagaagttagttaaaacagagaagttgaggagatcctctgaagcaacctgtgtgattgtcccaccaaagaccttccgcatatcatcaaaacct

SEQ ID NO: 88422 - DNA, 254 bp, Glycine max
  Clone ID: 700907510H1
gatggcaaagctatttttgaaacaggcaaagcaatacgcagatgcaagaccaagctatcctccacaactcttccaattcattgcttccaagactccctctcactacctcgcttgggacgtcggcactgggagcggccaagctgccaaatctttagctgcaatatacaagaatgtgatagccacagatgctagtgacaaacaacttgaatttgcagccaagctcccaaatgtgagataccaacacaccccttcaa

SEQ ID NO: 88423 - DNA, 252 bp, Glycine max
  Clone ID: 700907512H1
caaggtgttgaagatgcctttgagctccttcatgaaatgaatgaacgtgtcaggacagggatctgggttggggattgttttatctacagcaattcttcttggaggcttaactattgtgttggtggtgaggttactacaatgtttcatttggaccgtcctatgtacttgttgggatatcttgccagccaaagtaaggtctatttgatagacaaagaattcaatgttgtgggatacacactacttttaagtttg

SEQ ID NO: 88424 - DNA, 254 bp, Glycine max
  Clone ID: 700907513H1
caaagagccattgaactttgactataatattcagagttcagattactcactctaatcttctaagttttcattttggggtttaagtttctgaaggaaaaattaatgataaagtttgttctatttttgttctgctttgcctctgcactgaccctttcagtatcggagtccaaatcagcttcagtgcaacctcatgctgctgaatctttctctgttggatatattcagatgaagactgcagcgaactgttcttacct

SEQ ID NO: 88425 - DNA, 255 bp, Glycine max
  Clone ID: 700907514H1
ctggattcgagctaacctttgccttttcctttgggcccaatttaggagatctttttttcgggtattgaaaagtttattcatcatttagattcagactcaggttcaataaatatttgtaaattatttatgaataagatttacatattagtagtgaaaatcaaacaatgtttacgtggaatatgaattcattccttattggaccgacattttttttacacccaatttagagaataatatcctagcaaaatgggggat

SEQ ID NO: 88426 - DNA, 255 bp, Glycine max
  Clone ID: 700907515H1
ctgagaaaaaaaaatggatgtagagaaagccttccacatgactggaggagctggcaaaactagctatgccaagaattcctcactacagaagaagcaatctgataaagtgaagcacataatcatacaaacagttgaggagctctaccttgcaaccactccaaagagcataggcattgctgatttgggctgctcctctggaccaaacaccctatcaatcatcaaagatatctttcaggccatccaaggcataagcca

SEQ ID NO: 88427 - DNA, 271 bp, Glycine max
  Clone ID: 700907517H1
ttcggctcgagctctcatcggagggaaacaatcaataaaagataaaaaaaaacccacaaaaagattataacaaaaaaagtatgaaaggaaaagtactaggttccgcagtttctctcatcataatggtgggtgtggtaattggcgtggttgctgtagttcaaagcccaaagggcgtgaacaacaacaacaatggaggagaattgaaaaccagcaacagggccgtgacagcgttgtgccaaggctcatacgaccagaaacggtgccacgaggt

SEQ ID NO: 88428 - DNA, 257 bp, Glycine max
  Clone ID: 700907518H1
aaatgcccactttttttcttccaacgctcctcctccttctcatagccttcgccacctctgtctccggccgccgtgacctcgtcggagactttctccggctgccctccgaaactgataacgacgacaacttcaagggcacccggtgggccgtcctcctcgccggttccaatggttactggaattacagacatcaggctgatatttgtcacgcctatcaaatattgaggcaaggtggtctgatagatgacaatattatt

SEQ ID NO: 88429 - DNA, 256 bp, Glycine max
  Clone ID: 700907520H1
cagatgaccaagtggaattcatcacaggaatacatgacggtgtttcaacagacgataaatctaaatgggaatgtgtgaggaaaggactttgctgtatatgctgcgaaagcaatattgattctttgttgtacagatgtgggcacatgtgcacatgttcaaaatgtgctaatgatttgctccaaagtagaagaaagtgtccaatgtgtcaagcaccagtggtggaagtgagttgagcttattctatacaatagttttg

SEQ ID NO: 88430 - DNA, 253 bp, Glycine max
  Clone ID: 700907521H1
gccaagcttctcttagcattggatctgaaaggacaattggaggccaagaacccatccaccaagtgcaagtaagcctccaagtcatgacaacacgccatgtcagcatcgggcttaagatatggcgacatcttggtgtgcacacgcagctctgttcccacgtgcgagtatgctaagggcgtgttctcctccaacacacccccaccaacgttccgtattttctgttcaagctcttcgctcacgaagatccctggaa

SEQ ID NO: 88431 - DNA, 252 bp, Glycine max
  Clone ID: 700907522H1
atttgttctccgtcatctcgcgtcgttagttcattgaactcactgcattgagtggatttggtccaagttgagtttagaaatggatggccatcatcagaagcaaaaaaacaagtacagtataattgttcctacatataatgagcgtctcaacattggtctcattgtttacctcatcttcaagcaccttggggatgctgattttgaaattattattgtggatgatggcagtcctgatggtactcaggatgttgt

SEQ ID NO: 88432 - DNA, 251 bp, Glycine max
  Clone ID: 700907523H1
cacaattcattttcgaacgaacgtgtcacagaattctcgccttttccgaatatggcatcgcgcgtcacattggcaatctcacttcctccgcgccgtatattaattcccctcattttcgctcacaacttaagctttccagcaactcctctttgcacaagccactcatgcgcgacaagactgtgctggtaaccggcggagccgttacatcggcacccacaccgttcttcagctcttgctcggaggttgcagaa

SEQ ID NO: 88433 - DNA, 254 bp, Glycine max
  Clone ID: 700907524H1
ctgagggccttccatggcttccgcttgtgcttcctctgcaattacagctgttgccatctctacgccgagttccgggcagaagaatggatcaggaggttgttttcttagtggaaggaaattgagggtgaaaaaggagagagcagcaattggaggacgatcgatgggcactacagtgtgcgcatttgctgagcctgacagacctctatggttcccaggcagcacccctcctccatggcttgatggcactctacctg

SEQ ID NO: 88434 - DNA, 251 bp, Glycine max
  Clone ID: 700907527H1
gaaatttgattcattaataagttcattcactcatttggatgaagagttctctcatatgattcagataaccaaaactcacaagtctcttgaaaatgtggaacttattgctctaagaaatgacattgatctgcaggcaaagcactcgtgggccactttacattcccttcttcattctgaaagaattgcttaccgtcagaatgggtatatctggttaggtgatctgcttatttctgaaatcagtggggaaagca

SEQ ID NO: 88435 - DNA, 254 bp, Glycine max
  Clone ID: 700907530H1
agtaggcaatagaatagatggcagaggaagagtcttatccattgtttgagacaaggagggccaatggaagggtcatttacacaatcttctctttatcactttttgtgggcattttgttcatctgggttttacagagtgagtcacatacccagagaaggtgaagatgggaaatgggcttggattggtttgctttgtgctgaactatggtttggtctttattggctcctcagacaccctttcagatggaaccctgt

SEQ ID NO: 88436 - DNA, 251 bp, Glycine max
  Clone ID: 700907531H1
gtctgaacctcaaggagaccgagctttgcctcggtttgcctggtgggggaggcggcggcggcggcggtggtgaggtggaaactccaagggccactgggaagagagggtatctctgagactgttgatctgaaacttaatcttcattccaaggaagatctgaatgagaatctgaagaatgtctcaaaggagaagaccctccttaaggatcctgccaagccaccggctaaggctcaagtggttgttggccacca

SEQ ID NO: 88437 - DNA, 254 bp, Glycine max
  Clone ID: 700907532H1
cacagtacaatgagcggaacacattctatggattcagggaaaccaaggcaggaatcttatcaaagtcatgcaataccatgagatcctctgaatccacagtacaatgagcggaacacattctatggaccctttgaagaggattttttagaagattttgtaagacaaaacctgattcctttggctgtgcctgtatcctatgaaacactcaagttgatgaaagcagatggaaggaaaatagttttgacaattgttga

SEQ ID NO: 88438 - DNA, 257 bp, Glycine max
  Clone ID: 700907533H1
ggttgttgagattgagaaaaatacagagagacactgtagatcagatgccagatcgaaccaccaagacctgcaatttttaattttaattcagattcccttttcacttttaatccaaaaccctaatttcctttttctaccctccagtgtcgccgtttctcaacaattcttaccctaatcatcagccatccaccaataacgattcaaaaacccaaactttgtgtgaagtagttcactccccatcactcgttgtttttttt

SEQ ID NO: 88439 - DNA, 253 bp, Glycine max
  Clone ID: 700907536H1
agcaccgaagcgttaactccaatggcgtctcttccacttccttcactcgtctatctcggactcttcttccttcttcttctttcaaattcaggcctcttccttcttcacctcctcgcgccgccgaaaacgccgttcccgaaagcgcacagcacccgtcgaaaacccgctcttcaaaactctcgaactcggcgccttgtttggcttatggtacctcttcaacatctacttctacatctacaacaaacaggtgttg

SEQ ID NO: 88440 - DNA, 252 bp, Glycine max
  Clone ID: 700907537H1
gttgggattgcagagagaagggtggttagtgttagaataggctgagtgtggatggggaaagaggaggaagagatgaggggtgagattgaggaacgactgattaatgaagagtacaagatatggaagaagaacagtcctttcttgtatgatctggtcattacgcatgccctcgagtggccttccctcactgtggagtggcttcctgaccgccatgaaccacctggcaaagactactccctccagaaggtcatc

SEQ ID NO: 88441 - DNA, 250 bp, Glycine max
  Clone ID: 700907538H1
ctcaaaacccccacttcgcgttacagggagggacaggctaaaacaatcatggcggcgcagtggtggcgctccgccgccggccaccttcgaacggtggcggcgggccgtggttccttgtcgggattccagcgcacacttctcacacgatccaagccatcccaagggagtgcagcggcagccgagtctcggcgagagaccgaacgcaaggtcgaataccttgcgtcgttttcctccagaaccttctggaaaa

SEQ ID NO: 88442 - DNA, 252 bp, Glycine max
  Clone ID: 700907540H1
atctttgccttctgcatgttggttctctgtaaacagatactgcaaaagaagaataatattgaatatttggttgggttgaatccctgggttgaagcgttgcagacatcacggctattctaagagtgtctcgctctctcattcatgtcccaactgtacgacggaggacaggttgcgtaactgccaccaacccttcgccgcacggtgggcgtggtgctttgccttctgaaggtggtagcccttcagacttgctct

SEQ ID NO: 88443 - DNA, 253 bp, Glycine max
  Clone ID: 700907541H1
ctcgagccgctttcctttcttctgctagtgtttcaaacgggaaaaatgagggtttggattctcggaatctcacatgaggatgagatggaggaagaagctcctgagacaagtaacaacacaactgaacttagtttgggaagctttggcgggtttgggattagctcaagccccaacccatcaatgcctaagacaaatccttttgggggttcatttaataatgtaggaacaagtttatcaagctctacagttacat

SEQ ID NO: 88444 - DNA, 249 bp, Glycine max
  Clone ID: 700907543H1
gagagagagagggagagggcatgggaatccgatcggtattcgatggcggcgagctgagaagggaagtggagaaaagtggaattgacccaaaattcattccaaagatatggaagcatatcctcatctctgccaaagatgaagattgggattgggagaaacaagttccctccttgccctcttcggcctactctctccttcgttccaacttcaaaacccctctctcttcctctattcactccgttttccact

SEQ ID NO: 88445 - DNA, 249 bp, Glycine max
  Clone ID: 700907544H1
tccgttctgattataaggatgcttttgttgaaaagcatggagtcaaattggggcttatgtctggctttgtcaaagctgctgtcaatgcactccaacatcagccgattgtcaatgcagtcattgatggtgatgatattatatacagagattatatagatatcagcatagctgttggtactccaaagggccttgttgtaccggttatccgcaatgctgataccatgaactttgctgatatagaaaagcaga

SEQ ID NO: 88446 - DNA, 250 bp, Glycine max
  Clone ID: 700907546H1
accctctatattccattacaaagaaccagtttggaatatatttttattccttctttgtttcttcactttcttccatacacataaccatgtcttctcagaccgttgtcctcaaagttggtatgtcatgtcaagggtgtgctggagctgtaaacagggttttggaaaaaatggaaggtgttgagtcatttgacattgatctgaaggagcagaaggtgacagtgaaaggaaatgtgcagccggacgaagttct

SEQ ID NO: 88447 - DNA, 246 bp, Glycine max
  Clone ID: 700907547H1
gaatgctgaaacaagctctctatcctttctggtagcaatgccctctgcaactgcaagcttcggattcttcttctgtcgacaacgcctttcttcttctttccccttccctccgcgtccaagactcctctccaccactcccaccccataccctctccaatacgaactcatcatcaaccgtccttcttaccccgactctccccgcccaccacctgctcgacctattgactcccctgaacccgaactcaa

SEQ ID NO: 88448 - DNA, 249 bp, Glycine max
  Clone ID: 700907548H1
agctgatctagtactactatcaatggccggacaaggagatggtcctgctatcggaatcgatctcggcaccacctactccttcgtcggagtgtggcagcacgaccgtgtcgaaatcatcgccaatgaccagggtaacagaaccacgccgtcttacgtcgctttcactgattccgagcgtttgatcggtgacgccgccaagaaccaggtcgccatgaaccccgtcaacaccgtcttcgatgttaagcgttt

SEQ ID NO: 88449 - DNA, 254 bp, Glycine max
  Clone ID: 700907550H1
ccctaaccctaaaaccgaatcttctcatgaaacctcccacgccacactcctccttatcagaatcaggttcgattccctaaccctccacaaatcgctttcttttctttgcagtttctccatggagggctctgcagaggatttcggagcccccgagtcatgggaggtcgctgatttggacgagtccatgaaccgcttgaacctcatgctctcttccaacaacgattctaagtaacctcaccaacgtgtcgccgatg

SEQ ID NO: 88450 - DNA, 69 bp, Glycine max
  Clone ID: 700907552H1
gagacacctgatagggttttgggtgctttggctgataagtatggactcatattcaccatcagcaatggt

SEQ ID NO: 88451 - DNA, 249 bp, Glycine max
  Clone ID: 700907557H1
caataacatagcatagagtgagaagtgagaagagaaaaatggcaatctccatacccagtagacaacttttcatagatggagagtggaaagtccctcttctcaacaatcggtttccgatcatcaaccccgctactgagacatcatagggcatattccagccgctactaaggaagatgttgaccttgcggtggatcgtgctaaaagagccttttcccataacaaaggcaaagattggtcttcagctcctgg

SEQ ID NO: 88452 - DNA, 244 bp, Glycine max
  Clone ID: 700907559H1
gacagtctcaccgatgaccagtagagggtgaaagttggtgcaaactgcaccatttcttaataaatgctgctcatatggtgctggctgcaacaagttaatgaatggaatagtgaaaactgcaccagtgtgagtgatcttgatacattaccatatcagctggttgtacatcatctagaattatggccatacttcttagggacaagttttggtaattttaaggagataccgtgttaatggtgactaa

SEQ ID NO: 88453 - DNA, 248 bp, Glycine max
  Clone ID: 700907560H1
catcagctcaatggaggaaccttaggcgagtttgtgcaacaaaaatattctctccacaattgcttgactccactcaaatccttcgccaacaaaaggttaaagatttattggattttgtgaaagaacgatgcaagaaaggtggggttgtggatattggagaggttgtctttacaacaatccttaattccatttcaaccactttcttctctatggatttgtctgattctacatctgaaaagtctcatgag

SEQ ID NO: 88454 - DNA, 248 bp, Glycine max
  Clone ID: 700907562H1
cttcttcccaaccactactaggctgtcattgcagatctcaattgcatcgctgtccatggctaccatcgttcgcatcaaggcccgccagatcttcgacagtcgtggcaatccaactgtcgaggtggatttgacttgctccgatggtacttttgccagagctgctgttccaagtggtgcatccactgggatttatgaggcccttgaattgagagatggaggatctgactaccttggaaagggtgtatcaa

SEQ ID NO: 88455 - DNA, 246 bp, Glycine max
  Clone ID: 700907563H1
ttcagtgccacagaggaggaattcttgcatttggtgaagctatccttgcccattagtccccagattgcttccgtcggatcctgttgcctttttggtgcaatttctaataatgtgttgtatgttgccaacctcggcgactcgagagctgttcttggcaggagggatacggtgagaaagaacagtccagtggtggcacagcgtttgtcaacagatcataatgtagctgatgaagaggtgagaaaagaa

SEQ ID NO: 88456 - DNA, 259 bp, Glycine max
  Clone ID: 700907564H1
ggctcgagattcataatactggtcggtacaataagtattatcctaatctccgctagttcaaatacaccccatgtcatgaaaattcccaccctcttcaataaggcatatacatcatgaagaggtgtgctattagcaatttgcagacatcttaatttgttgaagcttcccattcctagctagggtcagtctcaattgttgaatcgtcatggaacgcaaggggaaaaagcctgttaagatgtccgtgcctcaatttggaggg

SEQ ID NO: 88457 - DNA, 273 bp, Glycine max
  Clone ID: 700907565H1
tcggcattcggctcgagttcaaggctgattaccctccttatgggagggactttgctaaccaccaacctactgggaggttttgcaatggcaaattagctactgattttactgctgacacttacggttttaagacctatgctccagcatatcttagcccacaggcatcagggaaaaacctccttattggagcaaactttgcttctgctgcatctggttatgatgaaaatgctgctactttgaatcatgcgattccgttgtcccaacagttaagtt

SEQ ID NO: 88458 - DNA, 248 bp, Glycine max
  Clone ID: 700907567H1
cacaaaacttgctatagcagtaagctataactcatttgaggctctgtgagaattgagaaatggctaaagatgttgaggttcaagagcaaggaggagagtactctgccaaagactaccatgaccctcctccagcacctttgttcgacccagaggagctcacacagtggtccttctatagagccctcatcgctgagttcatagcaacccttctcttcctttatgtcactgtgctcaccattattggctac

SEQ ID NO: 88459 - DNA, 249 bp, Glycine max
  Clone ID: 700907569H1
ctcgagccgaatcggctcgaggttaaagaagagagaagaaaaatacgaaagttcgatccatggcccgttttcttcaagcgagagtggaaacgcaactggcccttcctcgttggattcgcagtcaccggagctctaatcaccaaactttcccttggccttaccgaggaagatgctaagaattccaaattcgttaaggcgcacaaaaggtgatttctgaatcgtgacatctgcctggctttgcactttatg

SEQ ID NO: 88460 - DNA, 246 bp, Glycine max
  Clone ID: 700907574H1
actcatcgtgcgcttgctcaaataacaattgaagtgtttattgtgtcaagttcagtttcaattttgagtccttagggtgggtttcgtaagatattatttaggtatatccaatgttttattggaggaagtgagctattttgatgaaagataacggatccttcttggatggattgttaatatgaccgtctaagcaaaacatgcctgaacctggcaatttcacgcattaagctgctgcaaaacaagaga

SEQ ID NO: 88461 - DNA, 247 bp, Glycine max
  Clone ID: 700907577H1
atcacatcacaatttgtgcattgcctcgtgtcgcttttcttctttgcttgccaaaaatcttacacacaccggtctcatggggcatgggttctcaccagcaagaaccatggctattggagaatgggcaaccgagggtgttgaccaaggagaataggcatggccgttctgcacaaagcatgtcctccacgtctttgcgcaagaagtctagccgaactcttgtctccaagcttccatgtgccacactcag

SEQ ID NO: 88462 - DNA, 247 bp, Glycine max
  Clone ID: 700907578H1
gctgaaaataaagtgaaagaaggccaaaatacaagcattagtgagaaaagtcctaaggaagagtcagacgttagccagctgaaggatactgatcctcctgatggatctagtaaactagagttgagtgacaagaatactccacaaccattgaaggccaaatctataattgttaagaaatctcaggctggtaaacttaaggctaagaagaacaatggttctcaacagattcgtgggaaaagaagaatta

SEQ ID NO: 88463 - DNA, 245 bp, Glycine max
  Clone ID: 700907579H1
ctccctcagaagcgaagaagaagccacagagaaccagtctcctactctctctcacccacaagaaaaatggcatctcacatcgttggatacccccgcatgggtcccaagagagagctcaagttcgctctcgagtctttctgggatggcaagagcagcgccgaggatttgcagaaggtggctgctgatctcaggtcatccatctggaagcagatggctggtgctgggatcaagtacatccccagcaa

SEQ ID NO: 88464 - DNA, 253 bp, Glycine max
  Clone ID: 700907581H1
aggtaaggtaggttaacactcttcttcatcgtcgtcgcaatgggacgtgtgatccgtgcgcacgtaagggagcaggctcggtcttcaagtcccacacgcaccaccgcaagggccctgcacgcttccggagcctggacttcggggagcgcaacggctacctcaagggcgtggtcaccgacgtcatccatgaccctggccgcggcgcgccgctcgccaaggtcgccttccgccaccctttcagatacaagaagca

SEQ ID NO: 88465 - DNA, 250 bp, Glycine max
  Clone ID: 700907582H1
ccgatggctaatctctcactcttgttcttcggtctcctcctattctccgctgccgtagccaccgtcgaacgaatcgacgatgaagacaaccttctgatccgtcaagtggtgccggacgcggaggaccaccacctgctcaacgcggagcaccacttctccgccttcaagacaaagttcgccaagagctacgccacgcaggaggagcacgaccaccgcttccgtatcttcaagaacaacttgctccgcgcca

SEQ ID NO: 88466 - DNA, 249 bp, Glycine max
  Clone ID: 700907583H1
cgttcgtatcgaagaagaagaagatggggaaacagattgtgccggtgaaatcagtgatctacgcgctctcccctttccagcagaagataatgccgggtctctggaaggacttgcccacaaagattcaccacaaggtctccgagaattggatcagcgccactctcttgcttggtcccctcgtcggaacctacacgtatgttcagaactacctggaaaaggagaagctgtctcacaggtactgaactcatg

SEQ ID NO: 88467 - DNA, 242 bp, Glycine max
  Clone ID: 700907586H1
ggatttttcaattattattatctcctagttgtgctgattgctgtctgaaccaaattctagctcctttcagctgcacaagagtctccaatcccaactctctctctctctccacttgccaaaggaaaaaggctaaagagaaacccacacacacacacacacacagaaatatgtcttccccaagcaagcgccgagagatggacttgatgaaactgatgatgagtgattacaaggtcgagatgatt

SEQ ID NO: 88468 - DNA, 248 bp, Glycine max
  Clone ID: 700907587H1
aaagccaagtccaggacacaaagtccattagcctcagaaaatgcaaaagcagagaaaggttcctttgggagtgcaaagaagcggctttctttcccagcttcacctgccaggccaaggcgccattcaggtccaccaaaggttgaaagcagcagctctaaatgcagagttagctgtggacaagggtgtggacagttgatcatacaagtaaaaggatggaaaagcattaaagtaggattgaaaatatatca

SEQ ID NO: 88469 - DNA, 246 bp, Glycine max
  Clone ID: 700907588H1
cactgtgagtaaaaattctaaatgagccgggcacaggatgcaaaccgatcattcttcccttttggaaatccttttaggatgatatcaccgaaaggcccaaaaatttcttcacagctgttgttattattacatgcttttgaagcaactttggaagagaggctgaaaaagcttattcccaagagcaaggatgagatcctcagcttgtcttggatgactttggccatgcaggcactttgtgagagtcat

SEQ ID NO: 88470 - DNA, 238 bp, Glycine max
  Clone ID: 700907590H1
aaaagcaataaaaaatggggataggggtactatttgttgggtttttcttgctatcttgtgttgtgtgtgtgcagggtgtggagccaaaagcctcacccacttgtacatttccggctgtttacaactttggggactcaaactcagacactggaggcatatcagcttcatttgtgccaattcctgcaccttatggcgacggcttctttcacaagccttctggaatggactgtgatggccg

SEQ ID NO: 88471 - DNA, 243 bp, Glycine max
  Clone ID: 700907592H1
ctgccaccttgagcaatctatgactttttctatttgtagtctgaaatacaacccagctagtggtgaagactcagaaatgcactttgtccgcttgctggatgaccagacttttgagctcatatcaatgagtatggttgcttcataattagctgctccttctcagatgacaataatgtgtattactgtgttggaactgcatatggactgccagaggaaaatgaaccaaccagagtaagttgagaa

SEQ ID NO: 88472 - DNA, 244 bp, Glycine max
  Clone ID: 700907594H1
gcaaagagagtgagaaaagaaggaagaagaagaagaagcgatggcaaatgaactacccgtcaaagcttttggttgggctgcttcagacacttctggcacccttgccccttttcatttctccagaagggaaaatggcgtcgatgacgtcactctcaagattctcttctgcggggtttgccactctgatctccacactctcaaaaacgactggggtttcaccacctaccctgtcgttcctgggcat

SEQ ID NO: 88473 - DNA, 240 bp, Glycine max
  Clone ID: 700907595H1
gctactctggctgttgctcagaatatgcgggatctttacaggctggttcttgttgacactcctctggctccatacttctctgagtgtactacatcagaggacttggatgatatgaacattgaaataatgaggaacactctttacaaggcataccttgaagacttctctagattttgtcagaaacttggtggtgccacagctgagataatgtctgaccttctagcttttgaggctgataga

SEQ ID NO: 88474 - DNA, 273 bp, Glycine max
  Clone ID: 700907601H1
catctgtacttatattctgtttatgtacgttcctgccaaaagcaaacacacctcctatagacactgaaaagccaaggacagagagtgcaatttcaactgtgggttctcttccccacccaactagtacacgttttattgcttatgaagagcttaaagaagcaacaaacaattttgaagcagcgagcatacttggagaaggagggtttggtagagtttttaaaggtgtcttaaatgacggtactcctgtagcaattaagaggcttaccagtggag

SEQ ID NO: 88475 - DNA, 280 bp, Glycine max
  Clone ID: 700907602H1
attcggctcgaggttgggcatcatggtgatactcaacacttctaatggcatggtgaccaacaacaatcctccattttgctgttgatcccctcagtgccaattctaggtccttgagtaagttagaaatgttgggcatcatggtgatactcaagaactcataaatcggcttctccctatccttcaggtaactaaaggttgaggatgaagaacgggagatgatcatggcctctctttcctagttcctctacctaactcttctgattttattttactttcaaat

SEQ ID NO: 88476 - DNA, 267 bp, Glycine max
  Clone ID: 700907603H1
tgctctgtgtctctcactctctctatatttgcatcattcatcggaaatggctctcgaggttgctgttaaggctgctgttggggctccaaatgttctcggagattgtccattttcccaaagggtcctcttaactttggaggagaagaaaatcccttacaaactccacctcatcgatctcagtaacaaacccgaatgttttttgggtgtgaatcctgaagggaaggtgccagtggttctttttgatggcaaatgggtggctgattctga

SEQ ID NO: 88477 - DNA, 264 bp, Glycine max
  Clone ID: 700907604H1
ctttttaaatctgaaggggataaaaaggttatccaccagttggtttccctatacaaccaagattctactgcttcggtaccagaaggcacaaatcctgttgatgtagcagctcttgtaaaatattatcttgctagccttcctgagccactaaccacattagagctttataatgagattagaagtgctcgatccagtatctgttccatgagaaacatactcaagaggctttccagtgtaacctacatgactctggagtttataaca

SEQ ID NO: 88478 - DNA, 109 bp, Glycine max
  Clone ID: 700907607H1
gcacatgttggtctcaaaatgagcatccggaaggtatatcgtttgtttatgtttcccggtagagtagttattagtttgcattagatgtcatcgttccacacaacatacg

SEQ ID NO: 88479 - DNA, 261 bp, Glycine max
  Clone ID: 700907608H1
cttctgccacaaatcagacagtggctgccttgaaacgtgcacaggagtcactgatatctgaaaacataaagatagcatctgcaagtgcctcaaatcctgggatacctccatcctctttaatgtcctttttggaaaagaatcctgcaatctctggtgttgtcctagaagattttgactctgtctttgtcaacaagttctaccatagtcatcttgatgatttatcaaatgtaaattcgtcagctgtagttgctgctgcttctc

SEQ ID NO: 88480 - DNA, 243 bp, Glycine max
  Clone ID: 700907609H1
ggcgtcttcagctcaagtgcctaacctcttcggcggcgccacctcagctccgccgccaactccggcggcgcaccatgacaacatcatgtcctcatccgacgccgccgatgcgctctcgcgcctcctccagcgcctctcgcccacgctctccctccccacgcgcctccctttgacttcctactcatatgttatgtctcatgcctgtgtctaggcttaacgacgtatctcctgcgattccaaact

SEQ ID NO: 88481 - DNA, 84 bp, Glycine max
  Clone ID: 700907610H1
gcacacagcagaatagaacaaacgcaggttcccaattgaaacggttctgaagaagtgaagagcaatctaggctttcctttctcc

SEQ ID NO: 88482 - DNA, 252 bp, Glycine max
  Clone ID: 700907611H1
cacgctgtggtgaaggagcttctaagaaagcaccctccaacacactttgtgctaacacatgctgtgactgagcccaccactttgggagggtatgacataccaattgatgcaaatgttgaggtgtacacaccagccattgctgaggaccccaaaaattggttaaaccctgagaagtttgaccctgagagattcatctctgggggtgaggaagcagacataactggggtcacaggggtgaagatgatgccattt

SEQ ID NO: 88483 - DNA, 255 bp, Glycine max
  Clone ID: 700907614H1
actcgagcgaattcggctcgagctccatatccccccctagctactgagcagccaaagggacaggaataataataagcctaacattctaaggccggaaaaataaaaaaggaataacaaaaatgtctggaaaggtaattatctcggctgtttctctcatcctggtggttggagtggccataggtatagtggtggccgtcaacaagaagggcgaggatcccacacttcaatctcaacaaaaatcagtaggggttatct

SEQ ID NO: 88484 - DNA, 215 bp, Glycine max
  Clone ID: 700907615H1
gatcacatggcaatgaagaagttcttgatgtgttgttctgtccctttcttaggtgcttagagtggacaatagcttggattttcacgacaaggatttggagtccgaggaaagcctgtgggacttgtacgagagatggatgagtcaccactcggattcgtgaagctcttgtgacaagtacaagcggtttaacgtgttcagagcgcgtgtgatgcatg

SEQ ID NO: 88485 - DNA, 207 bp, Glycine max
  Clone ID: 700907616H1
cggctcgagtgctgtaacttgttccatagcagcgatcggaatcgatcttatcgctgggggtaagaggcacagaggaatagaaccgtagcactatcgactgacatcgacctcaaagtacttgtgaagctctatgcggtcattgttcgcaggactggcagcaatttcaatgctgttataatcaagcgcttgttcatgagcaacgttaac

SEQ ID NO: 88486 - DNA, 251 bp, Glycine max
  Clone ID: 700907617H1
ctctcatcggagggaaacaatcaataaaagataaataaaaacccataaaaagattataacaaaaaaagtatgaaaggaaaagtactaggttccgcagtttctctcatcgagatggtgggcgtggtaattggcgtagatgctgaagttcaaagccaatggggggtgaaaagcatcatgaatggaggagaattgaaaacctgcaaaagggccgtgcacacgttgtgccaaggctcagacgaccagaaactgtg

SEQ ID NO: 88487 - DNA, 264 bp, Glycine max
  Clone ID: 700907618H1
tctctctctctctctctctctctctctgtgtgttgcgttttgtgaaatcttattcgacatggcgtcacgggacaacaagaaggcgtcgagcagccgagccggcagaattcgcaccctctccgatctgaaccgtccctccgccgattccgacagcgactccgatggccctcaggagtactacaccgcaggcgaaaagagtggaatgcttgtccaggatccttcaaagggaaatgatgtggatgaaattttcaatcaagctaggca

SEQ ID NO: 88488 - DNA, 262 bp, Glycine max
  Clone ID: 700907619H1
gtcggttcttccttctcaaatattcttgagatccccattttctccgaagcaaagccatggctaagggtcctggtctctactctgacatcggcaagaaagctagggatctgctgttcaaggactaccacagtgaccagaagttcaccatcaccacctactcaccgactggagtggctattacagcatcaggaaccaggaaaagtgaactgtttctggctgatgtcaacacccagttgaagaacaaaaacatcactactgatat

SEQ ID NO: 88489 - DNA, 257 bp, Glycine max
  Clone ID: 700907622H1
gaaccttaaattaattatagaaccatgtttgcaactaccaattcctccactttgtcacctttattctctttcagtagaacaacagcaacctctctgccttccaaacccacattctggaatttggttccaatgaaacaatcttcttctccggggcacttggccttagccttagacaatccacgtagaacacttcacgtgtcttgtggctccacatcaccacatgcttcccagagatcatcaattcaggggggtgaagc

SEQ ID NO: 88490 - DNA, 259 bp, Glycine max
  Clone ID: 700907623H1
tgtgaacagcggaagaatacaccgccacacgctgcaggccctttaccttgtgcttcctgcgttcctgtgagaacccacgttctctaacgcgcttctccttcaaagttcaaattcctatacatttgcgtaatcgcttctcaaatctcaacaaaagtattcccaaaaaaccctaattattattattaaacatgaggccgattctgatgaaaggccacgagaggccactgacgttcctcaagtacaacagggacggcgatct

SEQ ID NO: 88491 - DNA, 258 bp, Glycine max
  Clone ID: 700907624H1
tttgtggtgctagaagtttctatttctgggcattcagaagattgcaggaaaagttatcagcttttgttccatattgaacagggtgtctgatctagaatggagatcactagaataggccaatggttaagtcttctgatatgtgtactactattactgcagacagaaggggttcctgtgggaatcacttttgttgaaaatgcagtggcaaaaggggctgtttgtttggatgggagtcctccagcttaccacttccacaca

SEQ ID NO: 88492 - DNA, 253 bp, Glycine max
  Clone ID: 700907628H1
caacacttccgaaccttgcattgtatctacccacttctcaaccaacaatggcaatggcaacccaagcctctctcttcaccctactcctctccggtctcaaacccagcgaccgagccaccgcgccatggaaacaatcctccaccctctccttctccacctcgaagcccctcaagttctcgcgaacaatcagagcagcagccaccgaccagaccacagaggcaccggttgggttcaccccaccggaactggaccc

SEQ ID NO: 88493 - DNA, 249 bp, Glycine max
  Clone ID: 700907629H1
atcggataaaagggccatggagtcctgaagaggacgaagcgttacggaggttggttcagacttacggccctaggaactggtccgttataagcaaatccattccgggtcggtctgggaaatcgtgccgcttccggtggtgcaaccagctgtctccggaggtggagcgccggcctttcacggcggaggaagacgaggcgatcctgaaggctcacgccaggttcgggaacaagtgggccaccatcgcgcgct

SEQ ID NO: 88494 - DNA, 251 bp, Glycine max
  Clone ID: 700907630H1
tctcgagcgaatcggctcgagtacaaattctctgtgttgtgtagtgtacttgtgttaatacgtgttgttgttgtaggaaatttaagtgaagagagaatgatgatgaagtctgctatgtgtgcattggtgcttgtggcactggttgtggttgaagtggggcccatggctgaggctgcggtgacttgcaacccaacacagttgactccttgtcttccggcaattaattcaggttctgcaccttcgagtgcttg

SEQ ID NO: 88495 - DNA, 251 bp, Glycine max
  Clone ID: 700907631H1
atcatccgcagctgcttttattcgctccgcaaacagtgagccatggccgtcggaaagaacaagcgcatctccaaggggaagaagggtggcaagaagaaggcagctgatccctttgccaagaaggattggtatgacattaaggctccttctgtttttcaagtgaaaaatgttggcaaaaccctcgtctctcgtactcagggtaccaagattgcttctgaaggactcaagcatagagtgtttgaggtctcctt

SEQ ID NO: 88496 - DNA, 209 bp, Glycine max
  Clone ID: 700907632H1
gctcggtggcactgctacttcaactcactcccaagtttcctcctttctcacatataaacaattccaacgtctgcggatattcgcaccaaggctttcaatactgcttgtaggattgtgatccctgcttgccttacatgcttttccatgtcagtgttcgcataccatatattgcagactgtcttattgatacagtggactgactactgaga

SEQ ID NO: 88497 - DNA, 265 bp, Glycine max
  Clone ID: 700907633H1
aaagaaaaaaaaaaacccttagccaacacaaccatcatggccacctctgctattcagcaatcagcattcactggtcaaactgctctgaagcagctcaatgagttcgtccgcaagaccggtggcgccggcaaaggtcgcactaacatgcgccgcaccgtcaagagtgctcctcagagcatttggtatggccctgaccgtcccaagtacttgggtccattctcggagcagattccatcatacctgaccggagaattccctggtgact

SEQ ID NO: 88498 - DNA, 265 bp, Glycine max
  Clone ID: 700907634H1
aggaaacctgttaaatctggaagagtctaatagaagaaatgtctctctcgaaaggcgttggagtcttgaggtgtctattgagaaggtgattggatatgattcagcattaagatttgcagaatctgtaccagaaagtagagatggagaagttgatgcaatgatcccaattttggaacgagagtacatgcaaggtgtgttaataagtgaggttgtgttaaataatatgttttcatcaatgtctagaagggcacggcgacttcaaaaa

SEQ ID NO: 88499 - DNA, 263 bp, Glycine max
  Clone ID: 700907635H1
cctaatctcgctcagattttctccagaaaagggaaaataaataaaaaaagagaataataataatatcttttgtaattcgcaaaacgtgatcgacgctggcgcaaattgaaattaggaattagggttagggttttcattatcttcgcccggaaaagaaaggggggaagaagaaagaaccgttcctttatgatcgaaaaggtgcctttggtcatcatcgcggtgttaatcttggtggtgcaatcctctgcagcgttccacggtat

SEQ ID NO: 88500 - DNA, 259 bp, Glycine max
  Clone ID: 700907636H1
tgagccttctaatgaaaagtgtagatgagaatggtgatggtagcaagagagttatttctctgggtatgggtgacccaactctcaccacttattttcccatctcaaatgtagctgaaaaagctgttgctgaagcacttcagtcacacaggtttcgtggctatgctcccactgcaggtcttccacaggccaggattgacattgctgaatacctgtctcgtgaccttccttaccaattatcaagtgatgatgtttacatcac

SEQ ID NO: 88501 - DNA, 254 bp, Glycine max
  Clone ID: 700907637H1
ggtaaaaataatgcacatcaatcatggagtgaacccactgccagaagaatgccaatgccccatgacggtccagctaaatggaattcatcttgcctatcatcaaggaccctagaggatgatgcatcttcttttgccttaaaacacaaaactcaaacacaagaacagatgttaagcagtgaaagaacgtcatctggatctacaacaagcgatatgcaagtaaaaagggtattgtcatctatgagtgctgtgaatgg

SEQ ID NO: 88502 - DNA, 259 bp, Glycine max
  Clone ID: 700907638H1
gaataatatgaagagccatgtctcagaaagggttcagccttttgccaagtgcctccagagttgagatcacctctgcaataaaacttggagaattattacaattttcaaggtgacaaaagtgcatgtcatagatttttttatccttataaaatcgaagacaagtatggtaatttacaacagtccacgcatcctgctcaatcaagacctcctggtaaaggagatgtcatagattaaagctacacacatgctcaacaaagtt

SEQ ID NO: 88503 - DNA, 258 bp, Glycine max
  Clone ID: 700907639H1
gttcgccactcagagactcaacaaattgcttcgcctttggctctaaagtgactagcaaatcacgtgtcctcattctcgtcgagagtatgttttctctctctgttcagacttcagagtacgcttcctctctcacggtgggtttcattatgccataccactgaagaacgaagtttatctctctcttgtgacttgtgagcaattcaaattgcggagaacagaacctacacactgcattggaagatacaagaatatcatcag

SEQ ID NO: 88504 - DNA, 258 bp, Glycine max
  Clone ID: 700907640H1
aatggcaccgaagcagaccaaggctgagaagaagatcgcttacgatgcgaagctgtgcgacctaatggaggagtacggccagatcctcgttgtgaactccgataacgtgggatcgaaccagctccagaacattcgcaagggtctccgtggcgactccgtcgtcctcatggggaagaacaccatgatgaagcgctcagtcaggatgcacgctgagaaaaccggaaacaacgcctatctcaaccttatcccgctccttgt

SEQ ID NO: 88505 - DNA, 251 bp, Glycine max
  Clone ID: 700907641H1
tttaagttgacaaaaggcttcgcagcaaaagagtcagtgaagggacatatggtgaatgtagtaaaaggattgaagttatatgaggacattttcactgattcagaactgtgcaagctaacagattttgtgaatgagatccatgctgctggccagaatggggaactgtcaggtgaaacttttatattattcaacaagcagatgaaagggaacaagagagagctgattcaactgggtgttccaatatttggaca

SEQ ID NO: 88506 - DNA, 250 bp, Glycine max
  Clone ID: 700907642H1
aacgaaactgagagcagcagtgcgcagaatacagagacttctgattctaactcagctgatagttcctcttcaagtgattcatctgccaacagttcagaaggcacaagcaaagagacggttactgagcaatctgaaggtcacgatgagctatgattaactgggcatgcatgtaaggccggttttaatcatctacctgcaacgtttttatagtcagagatgtagactggtaatggtagaattaataggtgaa

SEQ ID NO: 88507 - DNA, 248 bp, Glycine max
  Clone ID: 700907643H1
gggaattttgaacatgaaaagttctttgtaagagttttgtggaagatggggtttaggaataatgcaattcaggctgggagtttggatgtgggaaagtcaaagggaaggatgcaaaaggatggtgctgagaaggaaattgggtgctgtgttaaattctgtttcattgggggctgtataccttcaagatcaaaggtggataactccataagtggcactagtgctaacagtgtggaaaaaacatctgcatc

SEQ ID NO: 88508 - DNA, 250 bp, Glycine max
  Clone ID: 700907644H1
ctggcatcacacattttataatgaacttcgtgttgctcctgaagtgcacccagtgcttctcactgaggctcctctcaacccataggccaacagagaaaagatgacccaaatcatgtttgagaccttcaatgtgcctgccatgtatgtggccatccaggctgttctctccctgtatgccagtggtcgcacaactggtattgtgttggactctggtgatggtgtgagtcacactgtaccaatctatgagggg

SEQ ID NO: 88509 - DNA, 243 bp, Glycine max
  Clone ID: 700907645H1
gagaactgttgtccctggggcatgcctttcctcagaattcagattagattagtgtttgtgagaaatctcaactgagaagtaaaatcaattctttactgagggatgaggaggatgattgggataagctactgaaacttactcaagaggaagatttttctcgagaaaatctacaggaccagctgccgcaaaatcttctgacgattaagctacatgcatggctccttcatataataagaggagcgg

SEQ ID NO: 88510 - DNA, 249 bp, Glycine max
  Clone ID: 700907646H1
gccagagcttcttccaaccttcaccacgggagtagttatggcttatgccctagagtacaatgatgagaaaggtatatgctttctgacggatcttcttgttgttggtgagaaccaacaaacttttgaccttgaaggagacagtggaagtctcatcatgttaaaaggtgacaatggtgagaaaccgcgaccaattgggataatatggggaggaactgctaacagaggccgccttaagttaaaagttgggca

SEQ ID NO: 88511 - DNA, 247 bp, Glycine max
  Clone ID: 700907648H1
cggctcgagtgctgttccaagtcccatagcagcgatgggaatcgatcttaaggctgggggtaagagcaaaaagaccaaaagaacagcaccaaaatccaatgacatctacctcaaattacttgtcaagctttatgggttccttgttcgaaggactggcagcaatttcaatgctgttatactcaagcgcttgttcatgagcaaggttaacaagcctccaatttctttgtcaaggttaattaagtataca

SEQ ID NO: 88512 - DNA, 263 bp, Glycine max
  Clone ID: 700907649H1
aggacattgtctagtccaaatgttccacatggttctccataccttcatcataccaagtctccaaaacctattgggtaaggttaacttttcactgtctttaatttgattgtctattcgttcagttcccacaaattaggccaccagctctacatacagcaactgttgtgtgtctgggagagtttatctgaaacctgatggaattattaaagtcttagtttcactatataatctcaaataaggtaagtgcatgagacagtttaatg

SEQ ID NO: 88513 - DNA, 259 bp, Glycine max
  Clone ID: 700907651H1
attcatttcaatggcaactcacggtcaagtcattacctgcaaagctgcggtggcctgggaacccaacaagcccttaactgtccaagacgttcaggtggctccgcctcaggccggcgaggtccgtgtccaaatcctcttcaccgctctctgccacaccgatgcttacacttggggcggcaaggatcccgaaggtctcttcccctgtattcttggccatgaagctgcagggattgtggagagtgttggagaaggtgttact

SEQ ID NO: 88514 - DNA, 253 bp, Glycine max
  Clone ID: 700907652H1
gaacgaaaatcgagagtaaaaggcgaaggagcggtgggagcgatgcgcatggttgttaacgacgcattcctcccattaactaaattgctatgtctttacctcttcgttttcattcctcatctttctctctctcttctcttggggttgtgagaaaagtgctagggagtcttataacagcattgatgaactgcaatttattccatcttcatagatattgttcaaccaaggagtggacattcgcacttagcaaaaa

SEQ ID NO: 88515 - DNA, 107 bp, Glycine max
  Clone ID: 700907654H1
gccctttattttggggttttagttatagggaattgggctcctaaaggagaaggggaattcactttggcagttgtttggatatatgttaagggcttcttccttttttt

SEQ ID NO: 88516 - DNA, 253 bp, Glycine max
  Clone ID: 700907655H1
gcaaccggtaacactgctcacgccaccgccggaaaatcgcaaccaccgtctgccaccatcagttgattacaatttgatggataacaataattggagacctaatcaaggcactgaagccaatatggatactagtgattggagaggtggactgccgcacgagtcacgccatagaattgtcaacaaaataatggacacgttaaaaagacatcttcctgtttctgttcaagagggattgcatgaacttcagaagatt

SEQ ID NO: 88517 - DNA, 244 bp, Glycine max
  Clone ID: 700907657H1
attaaggagttctcggatgtacagtcacagatccaacaaatatgtggagagatagctggaaacttgaaccttaatgacgtgtcacctgcagttgatgagtctgacctgtccctgaagaagttggatgaatatcaatctgagctccaagaacttcagaaggacaagagtgagaggttgcacaaggttcttgaatttgtgagtactgtgcatgatctatgtgctgtccttggtatggacttcttca

SEQ ID NO: 88518 - DNA, 248 bp, Glycine max
  Clone ID: 700907658H1
gtaaagtccaccgtctgtatgttaaacaaggatgaggaagtagacgagcccctcagtccgggcaaacacatgaaaactgcacaaagtgttttatcacttttgatagcgactattgcgcttctttggattctcaccgacctatgcagcctgttatcaattatcaagcttcagccagaacatggccccctccccattcggttttctttgcttgaacctgttggtttcatggtgtttgtttgggctgttgc

SEQ ID NO: 88519 - DNA, 247 bp, Glycine max
  unsure (1)..(247): unsure at all n locations
  Clone ID: 700907659H1
ccggatattgaatttggatggatgataaatgcgntgtcgataattggattcctgggatgtgcatttggcaccgtgggtggttgtggtgggggtggcatctttgtcactatgctctcccttattattggatttgatgcaaaatcagctactgcaatctccaagtgtatgattacgggtggagcagcagcgacagttttctacaatttgaagcaaaaacatccaacacttgacatgctcgtgatcgact

SEQ ID NO: 88520 - DNA, 248 bp, Glycine max
  Clone ID: 700907660H1
aaaaaccttcgggtgggtggcacacttcttccctacaggcagcgtcagctaagaattaagccaaaataattaattaattcttggcaaaatcacatggccgccgccgcagatgggctcttccggccgatctacgagggctgcatctccgcctacgacaacgacgtcgagcgccgcccctaccacaagaactgcggctgcgctctgcacagcaagtcgaggaggaacagcagagcgtgcgcgcacaagtt

SEQ ID NO: 88521 - DNA, 238 bp, Glycine max
  Clone ID: 700907661H1
attgacgcttgctggagatgcaataaagcactgggccaatgaccggttcaggctagccaagtgcggcaaagggttctgaagacgggccaccggcgggctcggtggtcccatctatgtcgtcaccgataattccgatgacgacatggtgaaccctaagccgggaactatccgtcacgctgtcacccaaaaaggcgccttgtggatcatcttcggacacagcatgatcatcagtttgaag

SEQ ID NO: 88522 - DNA, 245 bp, Glycine max
  Clone ID: 700907662H1
ggaacctagattttacactaaggtatttaaagagtgccatataagtgatgacaccaggaattcctttgaactttcccttgttggctgtaaatgtattggagcttatgtccgaaataagaagaatcaaaaccagatttgctggttatggaaaaaagttagatcacaggatgatagggggttccagaggttcttagatagtgttgagtataatcataaggatatattactttatgagagtgtgtttg

SEQ ID NO: 88523 - DNA, 261 bp, Glycine max
  Clone ID: 700907666H1
cctcgagccgaatcggctcgaggtttaaggctaacagaaccaagacagatacaatgccagaacttaacttgatcaccacacgttaccttcctaatatttttatcaatgttttatttttatgacaaaacttaggtgcagttccttagatgttttaggtcgtgttctctaattagagtgttatcttgtaaactttgctagtaaggtccacatttaaagtcaactctagtttctgaggtgactttaattatgaatggaaaaaca

SEQ ID NO: 88524 - DNA, 259 bp, Glycine max
  Clone ID: 700907667H1
ctgaagcagggtgttactactgtcttgaagtctgttttttgtggagcaccaatggctttattcatggcagttcttggtgttgttgccttggtgctctgtttttgctctgctctcttgaagtggaatgaattgaggtataggaggaaaggtttgcctcaaggcacaatggggtggcctgtttttggggagacaactgagtttcttaagcaaggtccaagcttcatgaagaacaagagggcaaggtatggcagttttttca

SEQ ID NO: 88525 - DNA, 252 bp, Glycine max
  Clone ID: 700907668H1
ttgtaatcaattttctttccatttgtcaaaccataccaatcaaccaacctcgttgcttcttgtgatcacttcttgaaccaccctcatggatattgatgagtgggagtttctctctgatgatggctaccttgatttcaatgaagagggtgggaagcaaaagcaaaagcaaagttcctttggaaaattggactcaaagggtgtctttgacatggactacttttgctcatcaccaccaccaagggtgagaactca

SEQ ID NO: 88526 - DNA, 254 bp, Glycine max
  Clone ID: 700907670H1
gttgagattaaattacaagttgtgaacgtgtttattgaattcttgattctcttaggaagcaataaggacatggcaaagatatcattagctttggtatttgcattggtggtgactgtaccatttcattcagttatgggtcaggatgatgcatggaaaagtataatagaccaagcaaaagatgaagcaagcaaagcaggtctctctgaagatacaatattcggggctgagaaggctataacagatggttctgccga

SEQ ID NO: 88527 - DNA, 231 bp, Glycine max
  unsure (1)..(231): unsure at all n locations
  Clone ID: 700907671H1
aaaggcaccagccgcagacgctgcaatcttacaagcacttccctcattctcgcgcattcataaatcataacacaaaccctatttttttctccacaatggatctaatatancaatactcagacggtgacgatctcgactctccctctgaaaatcctagctcccctccgcgcctcctcccgggacgttccgccgcgtctaacgtacgacgacaccatggtggctctcattgtt

SEQ ID NO: 88528 - DNA, 247 bp, Glycine max
  Clone ID: 700907673H1
aaactttctgtcgcacaaataactctaaactaagcacttccatacacaaattttctcacccagaagacatatctccatttcatttcgagtaaaagtaaaacacagttcctgatccatggcatctcgccgccgcatgttgttgaaggtcataatcctcggagacaacggggttggtacaacatcactgatgaatcagtatgtgaatcgtaaatttagtaatcagtataaggcaaccatcggcgcagat

SEQ ID NO: 88529 - DNA, 247 bp, Glycine max
  Clone ID: 700907674H1
ctcgagccggttgcagtcaaggatctcaagcgtggttttgttgcatccaactccaaggatgcccctgccaaggaagctgccaacttcacatctcaagtcattatcatgaaccaccctggccagattggaaatggatacgcaccggtgcttgattgccacacttctcacattgctgtcaagttttctgaaatcttgaccaagattgacaggcgatctggtaaggagcttgagaaggagcccaaatttt

SEQ ID NO: 88530 - DNA, 247 bp, Glycine max
  Clone ID: 700907675H1
gcataagaaagtggtaatagccatcgtcgtagccaccactgcacttgctgcactcattttcactttcttatgcttctggatgtatcatcataccaagtatccaacaaaatccaaatccaaaaatgttcaaagtccagatgcagagaaggggatcaccttagcaccgtttttgaataaattcagttccatcaagattgttggcatgaacgggtctgttccaataattgactataagcaaatagaaaaa

SEQ ID NO: 88531 - DNA, 74 bp, Glycine max
  Clone ID: 700907676H1
ccgacgacgacaacgacttgctctccctctacctccaattcgatcagctcgattcctcttcacttcctcctcct

SEQ ID NO: 88532 - DNA, 75 bp, Glycine max
  Clone ID: 700907677H1
cagcggtgattgtgtttatcataggaggatctgatgtactcgctcgtggatctcaactatattcacgatcatgat

SEQ ID NO: 88533 - DNA, 245 bp, Glycine max
  Clone ID: 700907678H1
aattagtactctcgttaattttcttgctaattgctaattgggcacaatggaaacgcttcatgctgtgtgcatcccatacccagcacaaggccacataaacccaatgctcaagctagcaaaactccttcatgttagaggcttccacatcacctttgttaccacagaatacaaccacaaacgccttctcaaatcaagaggttctgattccctcagtagtgtcccatcatttcaatttgacaacatcc

SEQ ID NO: 88534 - DNA, 246 bp, Glycine max
  Clone ID: 700907680H1
aaaaatgccaccaatgttgaacaggctttcatggccatggctgctgaaattaaaatcagaatggcaagccagccagtgaacaatgcgaggcctccaacagttcaaattcgaggacagccagtgcatcagaaggctggttgctcgctcgacttagagagatacgcatatttggggtctcagacgttcatgcgtctcagtggcatctaaaactagcttttcacattgctggcatatcaagattgttcg

SEQ ID NO: 88535 - DNA, 261 bp, Glycine max
  Clone ID: 700907681H1
caagtccaattttccaaagaaccaaaaatgcacccatctcgtgccgaagcagcagcatcacaaccctgctttaatggctgtttcccatctccacttcttgcctctgagaagtcccatagaactacttcttccaagcccaaagtcgtcaataataataatgtaacttcatcacacgatgacttcgtcgcagccacatcttccacccttcacccacacccaaatttcaccaaccacgagtccctcccatctttgcaagactca

SEQ ID NO: 88536 - DNA, 257 bp, Glycine max
  Clone ID: 700907682H1
caagtacgacacttccatcttcatcgtaaacaaacctcaaagttgcattccaccatgtctaaacaacccattgatccctttcgccacatcaacatagttctcaaccctaacggaaccctaaatcgcttgcgccatattcccagcaccgcaccctcttccgaccccactctcccagttatccccaaagacatcaccatcaaccaacaaaacaacacatggctccgcttattcctcccccgaatagcactatccccaaa

SEQ ID NO: 88537 - DNA, 257 bp, Glycine max
  Clone ID: 700907683H1
gcttgccaaggtcttgttgattgagcgttaagtgctttaactaatcaatcccaagaccttggtttaccttgccacacaaaaaaatatataaaaaggcaaaataataataaaaaaaagagaaggcttggagccaagaaaataaacacaaagcataagtcatggaaataatggttggaagtgcaacaaaggttgctttcaacctcttggtcactttcgccattgtcattccatgccttgaggctggcattgctgagttt

SEQ ID NO: 88538 - DNA, 244 bp, Glycine max
  Clone ID: 700907684H1
aacagtatctccatgtgaatcacttcggtctttatctatcagtaattgccctggatttggcaatgcctccctctctgtattgggaaagctgtgccctcagcttcagcatgttgaattgagtggactcgagggagtgacagatgcagggcttgcttcactccttgagagttccgaggctaatgatggttaaagtgaaccttatcggttgcacaaacgttaccaataaagtagtctcgtccttggc

SEQ ID NO: 88539 - DNA, 249 bp, Glycine max
  Clone ID: 700907685H1
gaaccctctctcatggctgcttccaagcttttttctgcttctctcctggtctccatggtcaccctcttcgtcctttcgtcggacaagtgcctcgcgttgcaatgcggggtttcctatgagacaatcaccgtcgtcaatgagtttcctcacgatccacaagccttcactcagggccttctttatactggaaatgacaccttatttgagtcaactggactttatggggagtcatctgtccgtaaagttgct

SEQ ID NO: 88540 - DNA, 255 bp, Glycine max
  Clone ID: 700907686H1
tagaaatggatggtgggacaaatggagatcatgtgaaggtgaaagaacaaatctcaaatggtgtggcagataagaagtctactaatcatcttatgatgcctgatgatgcagaattggctatcgatgaacaaaagaaaatagaaggcagcgtagatgggtaccaatctggatgatgttactagtgaagttgacaattacatggatgctttaactaccatggaatcagaactggaaactgacaatgagtgtaaacct

SEQ ID NO: 88541 - DNA, 251 bp, Glycine max
  Clone ID: 700907687H1
caccgctgaatcctagctttatcttcccttcccttcaaaataatatctctgttccaaacaagtccaacaacacactgctacaatctcaaacgtaatcggttacccttctctttttctctccaccttttcatgtttttctttcggattcttttacattgcattacatcaattgggtgatcttgggcacatcgagaaatgagtttgagtaatgggaaaaccgaggcaccattgccaattagtaatggggatga

SEQ ID NO: 88542 - DNA, 245 bp, Glycine max
  Clone ID: 700907689H1
acacaacgtaccaaaggaggttgaggagtggtcgcagttgcatagcagagcctcagaattgtgctctttgcttacgcttcttttacttcctctcttctcttcactctgtacagagacagacactgcacacatttatggccagcgtcggtgatagaaaggaatcagaatggatggataggataatctcagaaggagccatcccacttcttgaaccagataattgttcaaatggttgggctacccct

SEQ ID NO: 88543 - DNA, 243 bp, Glycine max
  Clone ID: 700907691H1
ataaaacggagaaaagaaaaaagaaaaatgtaagtggaagaagagaaagtggcatcgcttaggtacagatacagacacaacctggtaaaaatcccgaccccagtgccgcacaattttccttcactcgcagcggagatttaggattgtggtcttcctgtcttggaagtgctgcttgaaagatgaccttggtcatatggttgcttgtcatcattatttgtgtggtatttatccatgcattatgtg

SEQ ID NO: 88544 - DNA, 241 bp, Glycine max
  Clone ID: 700907692H1
ctcgacggaagcaaggacttggtgacggtgaagggaacgatggacgtgaaggagatgttgccgtacctgaacgagaagctgaagcgaaacgtggaagtggtgcctcctccgaagaaagacgacgataagaaagagaaagaaggcggcggcggcggcggcggcggcgagaagaaagcaggcggtggtgagaagaaagagtaagaaggcgacggcgagatgaaagagaaagacggtgcggcgg

SEQ ID NO: 88545 - DNA, 245 bp, Glycine max
  Clone ID: 700907693H1
tttaagcgtttctttactaatggcattcggcaactacaaacaaaagcaacaacaagaagaagaagaacaagaacacagaatggaagaagacgaggacgaaagcgaagaagaagaggaacaattttgggacgattgggaaggagaagacgaagaaggagagcagcgagactctgaattcgtgtgtctcttctgtgaatcccggtacagctcgtgcggttccttgttcgaccactgcgcctcccttc

SEQ ID NO: 88546 - DNA, 242 bp, Glycine max
  Clone ID: 700907694H1
caactcttcaaaagggagaagaaaaggaaagaaaactctcaaaaaactattatagcaatggcagaacaaaaccaaaaccaaacaactgaagctggaaggcaccaagaggttggtcacaagagccttctccagagtgatgctctttaccagtatattctggcgacaagtgtctacccaagagaacctgaatccatgaaagacctgagagtgttgacagcaaaacacccatggaacatcatgac

SEQ ID NO: 88547 - DNA, 199 bp, Glycine max
  Clone ID: 700907695H1
cttcagcgaggcctttgatgcggcttgttttcctcttactcttttctcaagctcatttgatccaggttgggcatttggcttgtcagctaccgtgatccaagggttgctgggcatgctagtggaggggtcttcagacaatgtcaatcagtgtttcttggaggcttcacgttttggcagtacagaacttgtgcgcatacta

SEQ ID NO: 88548 - DNA, 245 bp, Glycine max
  Clone ID: 700907696H1
ccataccctaaactaaaccctcctttgatatttcattttattctattctatgcctttatgcctagaacgtttacttgaagctgcatcaattgaggagggattcttcatctttggattcgcttttggtgcctcggagtcagagctgcaaggaaagtggagatgctgggatgaaagctgaattttgtgggaaatggctactttagttgaaccccccaacagaattaagcctaaggggaagcattatt

SEQ ID NO: 88549 - DNA, 82 bp, Glycine max
  Clone ID: 700907701H1
gtcgtcgcttccatgactttcctcagacaggtttggcttcacggaaaccagttcagtgggacaattccacacaacatacgag

SEQ ID NO: 88550 - DNA, 248 bp, Glycine max
  Clone ID: 700907703H1
ctagcccaaatgctgccaactatgcaccacaagctcaaccaggttatggggtgcccccaacctcccagccggctacttatggcagtcaacctccagcacagtctggttatggatctggctatggaccccctcagacccaaaagcctagtggcacacctcctgtgtatggacaatcccaatcacctaacgcagcagggggatatggtcaatctggtcatttgcaatctggatatcctccttcccagcct

SEQ ID NO: 88551 - DNA, 242 bp, Glycine max
  Clone ID: 700907704H1
cacttttctactttgagtcttcttgatccttctttttctccttgaactcaaacatggtagatgaggtggttctgctagatttctggccaagtccatttgggatgagggtcaggattgcacttgctgaaaagggtatcaaatatgagtacaaagaagaggacttgaggaacaagagtcctcttctcctccaaatgaacccggttcacaagaagattccggttctcatccacaatggcaaaccc

SEQ ID NO: 88552 - DNA, 203 bp, Glycine max
  Clone ID: 700907705H1
ggaaagggtgttgtcagtagatgagatatcggagcaatactgggtggctgcatcatctgcttcatcatcatcatcatcatcgttcaagtcaaagatgaacctgagcgaatccgaatgggcctttccgcagttcctacagcaggaagctgtttcttcttcatctaattctgatcatgatgatgatcatcatcatgctaaactca

SEQ ID NO: 88553 - DNA, 156 bp, Glycine max
  Clone ID: 700907706H1
caagccacaaattagtactctcgttaatttttttgctaattgctaattgggcacaatggaaaagcttcatgctgtgtgcatcccatacccagcacaaggccacataaacccaatgctcaagctagcaaaactccttcatgttagaggcttccacat

SEQ ID NO: 88554 - DNA, 174 bp, Glycine max
  Clone ID: 700907707H1
gtggaactggaacattcttctacggttcggtaattcagccgttgattcgctaccactatctatcaccaccaatccctattcgtcccttatgctgcatatcccctctcatcacctccattcactccaactactccgtttctccgcaaaacggaacgcttcgcttccacacagcat

SEQ ID NO: 88555 - DNA, 245 bp, Glycine max
  Clone ID: 700907708H1
acagaactcccatttgaagtagatgctctactttgtacaataaggcgtgtgctttttgccacctcttgtctgaaggagttacaccccctagcaccttaaggctgcttttcacctttggctaccccgggaaaaagtatattctttcttgagctgtgcatcaaacactgaaataattttccatgaaatctatggagtctcttgaattatcttggagccttatatacagataatgtgtatataactta

SEQ ID NO: 88556 - DNA, 245 bp, Glycine max
  Clone ID: 700907710H1
cgcaaaaagaacgaggcatcatattcatattgatataagtgtagtaggatctgagaattggagtgagtttgatggcgagagcaagctctggtctgcaatacccagagcggttctacgccgcggcctcttacgttggattcgacggatccaccaaatctctcacttccaagttctccaactccaccgctcttcttctccacagcctctatcagcaggctagtataggaccttgtaatgtcccagaa

SEQ ID NO: 88557 - DNA, 245 bp, Glycine max
  Clone ID: 700907711H1
gaaggaaccacaagtggacagcccagtccccatctcctcgttctcggatgaggacgaggagatcgtacaagccgtagtgtcgtgctccatcccatcctactcactcgagtcgcggctcggcgacacacgccgggccacggccatcacgcatgaggtggtgcagaggctgacttcccgatccctgtcaggtttacccctggaaggtttcaactacgactcaatattggggcagtgctgtgagatgc

SEQ ID NO: 88558 - DNA, 246 bp, Glycine max
  Clone ID: 700907712H1
caaaaacatctgaagcactagccttgctgcaggaggaggcatctgaattacggaaactagccaatactcagaaaattgaaaataatgaactaaagactaagtgggaagatgagaaggcacaactagaaaagtctaggaatgatgctgagaagaaatacaatgaaatcaatgaacagaataaaatactacatagccaacttgaggcttttcatattcaatgggccgagaaggagcgtaatgctgctg

SEQ ID NO: 88559 - DNA, 248 bp, Glycine max
  Clone ID: 700907713H1
caatatattccattctctctgtgtatttccctacctctcccttcaagatgcagatgctcgtcaagaccctcaccggcaagaccatcacccttgaggtggaaagctctgacaccatcgacaacgtcaaggccaagatccaggacaaggaaggaatccccccggaccagcaacgtctcattttcgccggaaagcaacttgaggacggccgtacccttgctgactacaacattcagaaggagagtactctt

SEQ ID NO: 88560 - DNA, 248 bp, Glycine max
  Clone ID: 700907714H1
ccagaacttaagtctgtagccatggcaatagtaatcaaagtggcggctctctctggttcccttagaaaagcttcataccactcaggccttatccgagctgcaattgaactgagcaaaggggaaattgaaggaattgaaattgagttcattgaaatttcggagcttcccatgttgaacactgatcttgagatcaatgggacctacccaccaatagttgaagcttttcgtcaaaagattcttcaagctga

SEQ ID NO: 88561 - DNA, 251 bp, Glycine max
  Clone ID: 700907715H1
acgaaacaaccctaaacccctccttctagaactttcatgtccatcttgccctcacaaacccaagcgccatcttcgtcttcttcctctgcgccatctcccaaccctaatccccaacatggaaccggaaaccctattcctcaacccttctcttctctttccccctcaccaatcaacctcgctttcggatctctccagatctccgataccccaggttcgtcgtcttcagccgctcaagattctggtggatcttc

SEQ ID NO: 88562 - DNA, 248 bp, Glycine max
  Clone ID: 700907717H1
ggagcatctcgccttacagagaaataaacacgggcatgcaggagacagagacacatacatacatactccattgtcgttgaagaagatgggacgagccaggcttctggtttcagacttcgttctgtctttcatgtgggtatggtccggtgttcttcttcggatcctcgtcttcaaacacctcggcttcgctcatggacccctcggtgaggttatcaaaaccaccttctccgtcgccaacatgttcttct

SEQ ID NO: 88563 - DNA, 248 bp, Glycine max
  Clone ID: 700907718H1
caaattgttattttgatagggtttacagcaaatgcagcatagcctgcctcgtcacaaaatactacacaacgcagctctgtggttgatcgacgcattcttcacttcaatcccacaatgtctataacgcacagcctcaccacttcactctcttcttcttcctctgctttcttagctccctcttccttcaattccagaggacaggtttcgttgcctgtgaagagcgtgagcatttgcaaatgcgttgccac

SEQ ID NO: 88564 - DNA, 236 bp, Glycine max
  Clone ID: 700907719H1
cacaacttcatcaagtctaacaatcaacaatcacgccacagatctacgcgcactacatcatgacacaatagatctgtgttagtcctttggttttatcaaaccacacttgcaccaatcaaaaccacaaaacacaactcgtcacatcacatcacatcacatctattttcattacttcatcatttccactgcaattttcacaccacacacacacggcaatcatggaagttgatagtagg

SEQ ID NO: 88565 - DNA, 117 bp, Glycine max
  Clone ID: 700907720H1
ctttcattggtgtggcctagctgttatctcaatgagaaagccgtcatctcggcaattgcggactttgcgcattggggttcccttgtagcttgtaataaccttctgttatgctacttc

SEQ ID NO: 88566 - DNA, 158 bp, Glycine max
  Clone ID: 700907721H1
ggctctctcacgcagtcgcagtgagtgataaggaaaaccctaattgcggtattctcagtgccttcgagagaaaatggcagataatcttgttctccgtggcaccatgcgcgcccacaccgacgttgtgacggcgattgccaggcccatcgacaactccg

SEQ ID NO: 88567 - DNA, 241 bp, Glycine max
  Clone ID: 700907723H1
cccaaagttcatattaagagagacagagagagagagatcgaagggaaaaaagcatcagagatcatgaaacccaacttttcctttgtatctaagcttttgatactgcaatatctatcagttttatgcatttctcaggagtttgatttcttctactttgttcagcagtggccaggagcatactgtgacacaaagcagagctgctgctatcctaagactgggaaacctgctgctgatttcagca

SEQ ID NO: 88568 - DNA, 246 bp, Glycine max
  Clone ID: 700907724H1
cttcctctaccgctttcttcctcctcattaaggcgctactctctctctctctttctttttctttgttaggtctggtgacacttagttagacagaacgtgcgcaccgggtggggagaagatttagtgttatggccatggcggcagtctgagaagagtactgtgcttcttacgggagccggtggtcgcacaggagaaatagtttacaaaacattagcagcgagggcaaaccaatatgtggctagaggt

SEQ ID NO: 88569 - DNA, 243 bp, Glycine max
  Clone ID: 700907725H1
ttgcaatggctaacaacgtcgttgttgttcttaaggtagctcctgtttctctgcctccatttcccatcacaaacaatattacacaatttcaagagctaaagacacacacttcatctgaattgctaccaaaccaaaaacagattaacctcattcccttcttcctcgtcaatcctcagatacaaagctatttgctctgtgttggcgtgtctccctcctgaatcctcaacctcatcttccactgct

SEQ ID NO: 88570 - DNA, 244 bp, Glycine max
  Clone ID: 700907726H1
ggatgagaaaaagatggaactggaacatgtgaccagcttgtcaagaagagatcatgaaagaccaaatcccttttttcgagtgagagcagttagcttgggtggttggttggttactgaaggttggatcaaaccttctctcttcgatggcattccaaacaaagacttattcgatggaactagtcttcggttcaagtctgtgtcaacagggaaatatctatgtgccaagtctggagggggaaatgtc

SEQ ID NO: 88571 - DNA, 245 bp, Glycine max
  Clone ID: 700907727H1
gtatgttatgagatgtatttttggtgatccacggaaagcaccacctcctcttgagaaactcagtcccgaagcaactgtttcctttctctggaaaggagagggttcatttgttgaggagcttcttcagtgcataactcctcatgttgaagaaggcatcttgaatgatctcaagtttaaaattcatgctcatgatccttcaaattctggagatattcaaaaagagcttcgaaagtctctgttatggt

SEQ ID NO: 88572 - DNA, 243 bp, Glycine max
  Clone ID: 700907728H1
atcccctatgatcagatatgaactcagtagagtgtcagcaatcttatttgttgcaatgggtacaagaaaactgcaatgccctttggaagctagatcagggcttctccaagcatggtttggacctatgctgttggactttggttggctgcagagatgcagaaaagggcttgatatgaggaccttggaagaggctatggggcagacacttcttactctacctttaaagcagcagtatgtgctgtt

SEQ ID NO: 88573 - DNA, 245 bp, Glycine max
  Clone ID: 700907729H1
gagaatcttgagaggttcaaagagtcagaactcattcactgcagatgggccatgcttgctgttccagggattttggttccagaggcattgggcttcggcaactgggtaaaggctcaggaatgggcagcagttcctgggggccaagcaacctacctaggcaatccagttccatggggcaccctacccaccattctggccattgaattccttgctatttcctttgtggagcaccaaaggagcatgga

SEQ ID NO: 88574 - DNA, 91 bp, Glycine max
  Clone ID: 700907730H1
aaaaaacttgtcttttaagttttaactctaagccatggctcttcccctgttcctcctctgcttcatgctctgcatttcacccacacaacat

SEQ ID NO: 88575 - DNA, 242 bp, Glycine max
  Clone ID: 700907731H1
cctgaacctgtctgcatccattcccatttcttcttccgtatgcatgttcccaccgtctaaaaaacctagcaaagcaacaaaacggcgtcatgcttgggaagtagcatgcaatggtaaccctagaaataggagggacattctgatcggccttggaggactctatggtgctacaacaagtctcacaagtaacaacactggttctgcctttggtgcttcattgtcgcctccagatccaactaact

SEQ ID NO: 88576 - DNA, 114 bp, Glycine max
  Clone ID: 700907732H1
ccctggcttttctgagctgacaagcacttccctaaaagagagatggtcatttgacagtgagtcgtttggttttaattgtgaaaggccggttagatccagtagtcggttttcaaa

SEQ ID NO: 88577 - DNA, 247 bp, Glycine max
  Clone ID: 700907733H1
caaaagttggtcgtatcataatccaaaagacaagcatgtttggactagctccttctaggcttcaagttctatacagcttgcgtgactatagaactgaaggggcatcagaaccagagtggaaagaagtaaccgtcagatcaagtactgagatagtctttcagcctgaaaatgcttcaaaagttcgaaagtttaagctctcttcagtgagctctatgcttcttagcgcttgaagttgcccaaactaagg

SEQ ID NO: 88578 - DNA, 245 bp, Glycine max
  Clone ID: 700907734H1
gaagttcaaaaacagtgtaacaaaaagaaaaagaaaaaaaatatgaagttcgctataatcacaatattgttctctttatttcttcttgattttggttttgcacaacagggggatcttgacatatcaagatttggagtaccaccaaatacaaatataggccaggctttcttaagtgcctggactcaagcatgtgcatcaccaactgctgtcaaaattgtgattccagctggcacataccaaatggg

SEQ ID NO: 88579 - DNA, 232 bp, Glycine max
  Clone ID: 700907735H1
ctcgagccggatttttgtttctctgtattccccgtttgatccctgctcaggttctggattctcagtgtttgcgaacgctgcatcatcctttggggaagaatggatcatcaagggcatagccagaacccatctatgggggtggttcgtagtggagctcaattagcatatggttctaacccatatctgccaggccaaataactgggccaccggggtctgttgtgacatcagttg

SEQ ID NO: 88580 - DNA, 160 bp, Glycine max
  Clone ID: 700907738H1
cgggagcatcatggtgaacacagtactgaatacacaggagagcatcatgttggtgagcacaagccggagcaccatggaggagaagagcacaaagaggcgttcctagacaagctcaaggacaagatccacggcgacgagggtggcgccaccgccgagggcg

SEQ ID NO: 88581 - DNA, 122 bp, Glycine max
  Clone ID: 700907743H1
actgaggttcattgaacctggacgtgtttttgggcgtggactggatgatggtaacgaacctttggcctcatcgcttccgtcagatctcattcttcatccattcacagccacatcccacacaa

SEQ ID NO: 88582 - DNA, 243 bp, Glycine max
  Clone ID: 700907751H1
cacacacaacttcataaagtgtaacaatcaaaatcacgccacagatctacacacaccacatcatgacacaatagatctgtgttagtcctttggttttatcaaaccacacttgcaccaatcaaaaccacaaaacacaactcgtcacatcacatcacatcacatctattttcattacttcatcattttcactgcaattttcacaccacacacacctcacaatcatggaagttgatagtaggtttc

SEQ ID NO: 88583 - DNA, 127 bp, Glycine max
  Clone ID: 700907752H1
cagatgacagctcggtcctatccaggtttaaagacatcccatcttataaaagggttatgttattgaaggataaaatgggcgacgtaccaagacaaacagtggaagaaataaagaagcatgcggatgc

SEQ ID NO: 88584 - DNA, 199 bp, Glycine max
  Clone ID: 700907753H1
atttaatcattttcgggatatatggggggtaggtgtggggagaacaagaacaatgacctgagttgttaaacttttttattttgagagaaaaaaacattggacatagtaaagccatggaagagatcaccaagaacctatcagggacttctcttttggtaccatcagttcaagaattggctaaagaaaagatatctaatgt

SEQ ID NO: 88585 - DNA, 233 bp, Glycine max
  Clone ID: 700907754H1
gaaaccttcgccaagaaccgtgaactcgaagtgatccactccaggtgggccatgctcggagccttgggctgcgtcttcccggagttgctgtcccgcaacggggtgaagttcggagaagccgtgtggttcaaggccgggtcccagatcttcagcgagggtgggctcgactacttgggcaacccaagcctgatccacgcccagagcatcctcgccatctgggccacacccattag

SEQ ID NO: 88586 - DNA, 151 bp, Glycine max
  Clone ID: 700907758H1
cgcccttcgctcgcaaagccaaagctctcgatgccgtgccaccatctgctccaaagttttcatattcgaagaggaataggagtattgaaggaaatctgaggtcaggccacattcctacagacattgggaagttgaccaatttagtaaaact

SEQ ID NO: 88587 - DNA, 84 bp, Glycine max
  Clone ID: 700907760H1
ggccgcccttttttttttttttttacaacttagcaactcacaatttcttttattccaaacaaaccaggaggatacaataacaat

SEQ ID NO: 88588 - DNA, 239 bp, Glycine max
  Clone ID: 700907770H1
gtacccttcatccattcacatcaaattttgcaactttgtttccaattgcgtgcacccatgtcctcttctctttccttatcgctctctgctccctccatccacgattcttccttcctccatggaacaaagctctttcccttttctcgaagagtggcaccacgccgcttcaattctttctctgccaagtgctccctcgaccacatccccaaacagttccgaaaggaaaatctcaaagatgg

SEQ ID NO: 88589 - DNA, 235 bp, Glycine max
  Clone ID: 700907771H1
cttcaacttaagagatcaatatggccaccaccactacccagcctccctctaatatctgttttttccttctgttgttgcttctagcacactttcatttgggcataagccaacttgagctgaattactactctaaaagctgcccaaaagctgaagagatcatcaaggaacaagtcacacaactatataacaagcatggaaacactgccgtttcgtgggtcagaaatctcttccacga

SEQ ID NO: 88590 - DNA, 239 bp, Glycine max
  Clone ID: 700907772H1
aagaaattgcgaagtctaaagccaaagaagagaagaagaaagtagaggctgagattgagctgctcttggtagtagagaagcttcaagagttacgctccataagaatacaaaagttgaaaaaacaaggccattttctcccagaggaggatgacaagtttcttgagaaagttcaagctgctgtggaagaagaggagcgtgaagctttggctgcagttgaaacagatgctgctaaagatgca

SEQ ID NO: 88591 - DNA, 234 bp, Glycine max
  Clone ID: 700907774H1
ctctccttctcgctctttcagctttgacttttgttggaaactaaggcctaatcaaaatggtgaagttcacagctgaagagctacgtcgtattatggactataagcataatatccgtaatatgtctgtcattgctcatgttgatcacggaaaatcaaccctcactgattctcttgtggctgctgctggtattattgctcaagaagttgccggtgatgtccgtatgactgataccc

SEQ ID NO: 88592 - DNA, 237 bp, Glycine max
  Clone ID: 700907775H1
gatgcagcctatgatggcagcctactaccccaacaacgtcactactgatcacattcagcagtatctggatgagaacaagtccttaattctgaagattgttgaaagccagaattcaggcaagcttagcgagttcgccgagaaccaagcaaggcttcagagaaatctcatgtacttagctgcaatagctgattctcaaccccaaccacccaccatgcctggtcagtaccctccgagtgg

SEQ ID NO: 88593 - DNA, 235 bp, Glycine max
  Clone ID: 700907776H1
aatggtgcgtccgttagtgggtacgtcaacggcgccactaacggtagcttggtcaagtacggttacgaagacggaaacgacgttgctgctgcggaggtggtggaagttgaagcctctaacaagctgagcgaggatgggaggaagaagaggttggaggagattgggaaagaagacgcgtggttcaaacaaaccgggaacgaacaagtggcagttgcacctgggggtcgttggaaca

SEQ ID NO: 88594 - DNA, 238 bp, Glycine max
  Clone ID: 700907777H1
ctcgagccgattcggctcgagcggtcacgagcttcaaagaagaatactgaagccagatgattactctgtcaatcctacttcacttgatcaaatgaattctgcaagcagaagttctgccttgatagatgaatattctgatgatgaagaagattttcaaatagcggaacctgaagaagaggcataccaaattggtcttgagaatgatgtgagaaaaacagccttggaagaagaaccggca

SEQ ID NO: 88595 - DNA, 240 bp, Glycine max
  Clone ID: 700907779H1
ctcagttgtgcatgcatcctcgttacatgcatggtgctgctactagctctgaattaaaggtctatgcatatgctgcggctcaagtgaagaaagccatagatgtgacacattatttggggggagaaaattatgttttctggggtggtcgtgaaggttatcaatctcttttgaacacagatatggagcgagagcttaatcatttggctaggttttttgaagctgctgttgcatacaaaaaga

SEQ ID NO: 88596 - DNA, 236 bp, Glycine max
  Clone ID: 700907782H1
gtttttgttgctgaggtggtgaggaagaagatataaaagttagggtttcttgtgattgagatctgagtagagtagtagaagaagaagaagaagaaagggcagattgatgggagaagaagaagaatcagctctcctcctctcccgcagcaagcgttcttcttccacattcacttataagtatcacctcttgatcgcttccatgttcctcctcgccgtctacttctcctcctcagcaa

SEQ ID NO: 88597 - DNA, 239 bp, Glycine max
  Clone ID: 700907783H1
gccctccctaaccccgacgccgatgaacccaccaacgacttcgctttagcgtctcatcctcaggaaaatttaagccattctgagactgagagttccgaagatgatcaagatgctccaccacaaatggacatctcgtggtcaacgatcacagccccagctggaagtggatccggtggtggcaccagggctggacttttcagaacacccatttctggtggcgtgcagagtgccacctcagc

SEQ ID NO: 88598 - DNA, 235 bp, Glycine max
  Clone ID: 700907784H1
ctcgagccgaatcggctcgagtgaattttcagatttgtgttattggcaagcaaattcatggctcgtgtacactatgttgcaagtgttctacttatttccatgccatgtgtgctataagggctggttatcgaatggagttgcattgtttggagaaaaatggcaagcagacaacaaaaatggtctcttattgtgcttaccacagggctcccaatccagatacagttttgattatgca

SEQ ID NO: 88599 - DNA, 125 bp, Glycine max
  Clone ID: 700907785H1
cgaaagagcaaattacactgatgtaatttgttcaaaattacttctttcctttttaactttacagtaatccccttttacaagaatacactgaggaatgcgaattttgaagaaaaaaaaaaaaacaa

SEQ ID NO: 88600 - DNA, 235 bp, Glycine max
  Clone ID: 700907787H1
ctgactctcacgcgcatcttcttcgtagcatttccccacactttaccctccacggagaggctcgccggacggcgctcggcgctcgtcgccgccgatcgattcggcaacgtagcattttcatggtaacgtcggaaactgaaaacagcgcgttttgagatttggctttttgcgtgcgtcgacgaaagagagagagagacacaaaaatgactaggattgggaacggaggaggaggagg

SEQ ID NO: 88601 - DNA, 202 bp, Glycine max
  Clone ID: 700907788H1
agctcctcgaaaatgctggcacgcctcgccgcgagtcgcttcaacgagatccgtcagattttccgtcagccttctagggctttctcaaccgctctgaactaccaccttgacacaccgcacaacaaccctaaccttccatgggaattcaccgaggccaatcaagcaaaggttaaggagattttgtctcactatccatacaact

SEQ ID NO: 88602 - DNA, 234 bp, Glycine max
  Clone ID: 700907789H1
atatagctctgtcagtgctcaaagcacagctaagattgaggaactgcttctagaagatcaaaatgttaagcgcagaagagatcgaatccagaaacaatcctcccttctctcaaaattgacacgccaattgagtattcatgacaaccgagcagctgctgcctctggctggtcaaatggtagtgcagagagtagcccaagaagcagcagcggacctggtgatgactggagatctgc

SEQ ID NO: 88603 - DNA, 110 bp, Glycine max
  Clone ID: 700907790H1
gatagactcttaaaaccgggtggctactttgtttggacatcaccactcacaaatgctcgtaacaaagagaagcagaaaaggtgggcgtttatacaggattttacagtaac

SEQ ID NO: 88604 - DNA, 236 bp, Glycine max
  Clone ID: 700907792H1
ctacagttacacttgtgtgctctaaaacgaactctctgaacttcaccaacgtgattcgcatggcgatttccaattcaatggactttcttcaactcttcattgctgtcttcatcgcgttctcaatcgcattcagagctcaccgaaaaaaatccctcagcacttctggcgcaatcgctgggttcttcgttatggcccttcacatttttgtgggttacaggtttggggcgatgctgctt

SEQ ID NO: 88605 - DNA, 238 bp, Glycine max
  Clone ID: 700907795H1
ctcttggcatcttgtgttgtgtccctcttttaagctatttccttctcttaacacaattggttgtgtcaattgccatagtcaccaaccaattaacaaaggtatatatatcatcatatcatcaccaaatgaaaaatattgggttgttttttcttgtggtggtggctacttttgtggtggcagccacagctggtagcttttaccaagactttgaaataacgtggggttgtgagcgtgccaa

SEQ ID NO: 88606 - DNA, 267 bp, Glycine max
  Clone ID: 700907801H1
ctcgatcagtggctggcagctacgacaacgaagctgttgctatatttgctttgatattcactttctacctctatattaagacgctcaatacagggtccctcttttatgccactttgaattccatagcatacttttacatggtttgctcatggggagggtacacttttatcattaatcttattccaatgcatgttctcttgtgcatagtaactggtcgctattcttctcgactgtacattgcatatgcacctcttgttgtattgggaa

SEQ ID NO: 88607 - DNA, 254 bp, Glycine max
  Clone ID: 700907803H1
aaccaagcttctctgttaaaaaaaaattaggcgtctaaagggccaaagcttagaaagttgaagctttttttgttgaggtgaaagtgaaatggttggcaaggataatctgagggctgaggacttgaacttgtgctttaagaagcttatgatggtggccgggagtgggaacagtgagaaaggggtgaacttgaaggttggggtgatcaccgagtggaaggatattcctgtggagcttctgatgcaaattctgtccc

SEQ ID NO: 88608 - DNA, 247 bp, Glycine max
  Clone ID: 700907808H1
aaatggcaagaatatcaaattggtctcttgtcttcctcctcatctctacactactccacatagagcccagcctctcaagcccaagcccaagcccaagcccaagcccgttcataaaatcctcctgcagcagcacccagtacccagccctctgcgtctcatccctctccgtctacgccttcagcatccaacaggaccctcaccaactcgttcagacagcactctccctctccctgaaccgcacccaagc

SEQ ID NO: 88609 - DNA, 252 bp, Glycine max
  Clone ID: 700907810H1
caacaaactgcattgcagcagcctactcaacttactcaactccaggatcagcaaagacagcttttagataaaacacataacttgtctagagcactaacacctggtcaagtactggaaattcctcatattattcagaattcactgcccgaggctaattctatctcaaatcagatgacaaaggccaattgccagagcaatattcaattctctcagcagcccaagcttcagcagcagcaacaacctggcatggtt

SEQ ID NO: 88610 - DNA, 262 bp, Glycine max
  Clone ID: 700907815H1
ctgcccctctttttggacccaaggtcggcttcggccggtcgatccgggcggaagacattgtcaggtggggactttggctggggcggcacatctgttacaagataacgcaggtgtgctaagatgagctcaacgagaacagaaatctcgtgtggaataaaacggtaaaagctcgtttgattctgatttccagtacgaatacgaaccgtgatagcgtggcctatcgatcctttagtccttcggaatttgaagctagaggtgtcag

SEQ ID NO: 88611 - DNA, 94 bp, Glycine max
  Clone ID: 700907818H1
gttgctttctaaccttaccgggcagcataaacataaactccttatcctctctctctctctgtctctctgcgtctttctctcactcacaccacac

SEQ ID NO: 88612 - DNA, 252 bp, Glycine max
  Clone ID: 700907819H1
ggaaaccactgttcttgtgaggaacattcaattcccaaatggcatttccttgagcaaggatggttccttctttgtctattgtgaaggggttgttggcaggttacgtaaatactggctgaaaggagaaaaagctggaacttcagagattttagccatcctacctggatatcctgacaatctgagactctatgtatatagtgatatttcggcatctcttcattctagaaggtatatgtatgcatactacaatgg

SEQ ID NO: 88613 - DNA, 248 bp, Glycine max
  Clone ID: 700907825H1
cacgaaacctctgcaagaaacggcgacgtttcgtgcatctccgtcctcgatcaagattccgagtctccgcaggacgagattgccgtttatctcaaagacccactaaccagccggaacgagtgctaccagttggactctttctttgggcatgaagataacaatgtgggtcagatattccaccgagaagtaagcctcttgattccgggaatgttcagcggatgcaatgccacagtgtttgcttatggggc

SEQ ID NO: 88614 - DNA, 246 bp, Glycine max
  Clone ID: 700907828H1
gaaaaaaggaagaggcacagagagcagtgaaagagagaaaggaagaaaagagggagggagagaggttcgggggccatgtaattggaaaaatggaagcaacattgaagttggagtcccttgcgtgcatagactccaccactctctctcactcagagctcctcgctctttctctctcctctctatgctccacccatgatcgcctcactcccaatatcgaacccgctctctacaaccagagcaccggct

SEQ ID NO: 88615 - DNA, 248 bp, Glycine max
  Clone ID: 700907833H1
ctcgatcaatggctggcagctacgacaacgaagctgttgctatatttgctttgatattcaccttctacctctatattaagacgctcaatacagggtccctcttttatgccactttgaattccatagcatacttttacatggtttgctcatggggagggtacacttttatcattaatcttattccaatgcatgttctcttgtgcatagtaactggtcgctattcttctcgactgtacattgcatatgca

SEQ ID NO: 88616 - DNA, 266 bp, Glycine max
  Clone ID: 700907834H1
cagatctatgatatattccagttgcttccatctaagattcaagtgggagttttctctgctacaatgcctcccgaggcacttgaggtcacaaggaagttcatgaacaaacctgtgaggatccttgtgaagcgtgatgagctcaccttggagggtatcaaggaatttcatgtcaatgttgagaaagaggaatggaagcttgacacactgtgtgatctttatgagacattggcaattactcagagtgtcatttttgtgaacaccagaag

SEQ ID NO: 88617 - DNA, 246 bp, Glycine max
  Clone ID: 700907843H1
tgcggttattatcagcactgggataaacccaaaggctaagtcttactatctctttgatggctatgcccacttgtcctctggcctcgcctgtggcctcgctggcctctctgctggaatggccattgggattgttggtgatgctggtgtcagggctaatgcccagcagccgaagctgtttgttggtatgattcttatcttgattttcgctgaagctcttgctctgtatggcctcattgtgggtatcat

SEQ ID NO: 88618 - DNA, 258 bp, Glycine max
  Clone ID: 700907845H1
cacctattgaagctccagccttgtctttagatgagcttaaggagaagactgacaactttggttcaaaggcattaataggtgaaggatcgtatggtcgggtgtattctgcaaccttaaacaatgggaaagcagtggctgtgaaaaagcttgatgtttcatctgaacccgaatcaaataatgagtttttgacccaggtttccatggtctcaagattgaaggatgacaattttgttgagttgcatggttactgtgttgaag

SEQ ID NO: 88619 - DNA, 260 bp, Glycine max
  Clone ID: 700907846H1
ctgagatcaacatgttgcggaggcttctctcttctcacctcaaaaccctagccgccaccgctttttcttccactccccgatctgcttccgccgccgccagattcgccgctctctctcgctcctcccgctacttctcaacccagtccgaggatgctactgccatcaaaaagaaggttatggatgtaatgccaatcgctactggtcacgagcgcgaggagcttcaggctgagctcgagggaaggaatattcttgaaatagac

SEQ ID NO: 88620 - DNA, 259 bp, Glycine max
  Clone ID: 700907847H1
ctcaaggagatggctctgggaagaggcagtgcagtggttctactactttgcttcttgctgcttcactctcagatggctcgtgctgccacctacacagttggagattctgggggttggacctttaacactgttgcctggcccaaaggaaagctctttcgggctggtgacacacttgctttcaattatagccctgggactcacaatgtggtggccgtgaacaaggctggatatgatcgctgcaagactccaagaggagcca

SEQ ID NO: 88621 - DNA, 260 bp, Glycine max
  Clone ID: 700907848H1
gattggcaaggctatgggctggcaaatgtcactgcaagatatcagctgagggtcctcgtgcaagttatagggtcttggtttgtgataagcgccttcgttaatgcaaactcgctcacttgttttatatctcttcaatggggaaatcaacagaataaggtcacactcattttagcagagaagcctacgatgacgatgcaagtgtaaatatcacactttcttgtatttgtctgctggctcttgacatcagatcgccagagcag

SEQ ID NO: 88622 - DNA, 116 bp, Glycine max
  Clone ID: 700907850H1
tcggcacgcgcattaccagagtggttctagtaattcagtgctgctagaagatggaaactagtgaatggcatatcgagcgaagatctagcttcggctctgaatcccccttagcaaga

SEQ ID NO: 88623 - DNA, 260 bp, Glycine max
  Clone ID: 700907851H1
gagtgatcggtgttcacttgatctcatcataatcgtcagcgtcaattgtagaagctgccgatcagaaacatcgccgtcggactgcctgaagaggcgtctctccccgtcacgttgacggcggctttggctgagttcatctcaaccttcatcttcgtgttcgccggctcaggctccggcatcgcctacaacaagctcagcgacaacggcgctgccagccctgccggcctcatctccgcctccatcggccatgcattcgccct

SEQ ID NO: 88624 - DNA, 253 bp, Glycine max
  Clone ID: 700907853H1
gatgcagcctatgatggcagcctactaccccaacaacgtcactactgatcacattcagcagtatctggatgacaacaagtccttaattctgaagattgttgaaagccagaattcaggcaagcttagcgagtgtgccgagaaccaagcaaggcttcagagaaatctcatgtacttagctgcaatagctgattctcaaccccaaccacccaccatgcctggtcagtaccctccgagtgggatgatgcagcaggga

SEQ ID NO: 88625 - DNA, 252 bp, Glycine max
  Clone ID: 700907855H1
gcggatgttatccaattggggggttaaatcatttgaaggcgagggaaagatagttggtccaaaggaagttgaggtgacacaattggatggcactaaattgtcctacacagcaaagcacgtattgattgcaactggcagcagggctcaacgtccaaatattccaggacaggtgttgggtataacatcagacgaggcactaagtttagagcgtcttccaaaacatgctgtggttcttggaggaggttatattgc

SEQ ID NO: 88626 - DNA, 250 bp, Glycine max
  Clone ID: 700907856H1
tttttatgtcattaaagggagcaatggaaatcttaagacttccttttgtgctgatcaatcaaggtcttctcaggcaaatgatgtccgcaagcaaatcgttggcagcgctgttccagttcttaaaggcgaaaagttttccttgcggatactggtggaccattctattgttgaaagctttgctcaaggtggaaggacggttgtgacatctcgggtttatccaacaaaggcaatctatggagctgctaggttg

SEQ ID NO: 88627 - DNA, 248 bp, Glycine max
  Clone ID: 700907857H1
gagagagagaaagggaaagaaacctaatacaataccctttttctcagaaatcacactctcacacccacttcccccaattcccattctctctgaattacgagggttttcgagatcgaagagtctctgatcgatttcgattcggaaaaatagcgtcttcgagcgcaaccggtgctggatccaccgatcccacagctgccagaagaaataccaagcgacccaagtattcaaagtttactcagcaagaactt

SEQ ID NO: 88628 - DNA, 262 bp, Glycine max
  Clone ID: 700907860H1
aaaagatcccaacagtgagaagccgagcgattttgtttaccttccaagagatgaagcatttggtcacttgaagtcatcagattttctcgcttttggaatcaaatctgcatcccaagatgtcttgcctgtcttgactgatgcattcgatggaaatattttgagccttgagtttgataattttgctgaagtgcgcaaactctatgaaggtggagttacactacctacaaactttcttagcaagatcgcccctataccagtgatc

SEQ ID NO: 88629 - DNA, 258 bp, Glycine max
  Clone ID: 700907084H1
aagaggggcagctagaatcagagaccttttcaatgcagcaaggaaatttgcaccatcaatcatattcattgacgaacttgatgcagttggaggcaagcgtggaagaagtttcaatgatgaacgtgaccagacgttaaatcagttgctgacagaaatggatggatttgaatccgagatgagagtggtgtcattgcagcaactaaccggccagaagccttggatccagctctatgtcgccctggtcgtttctcaagaaaa

SEQ ID NO: 88630 - DNA, 260 bp, Glycine max
  unsure (1)..(260): unsure at all n locations
  Clone ID: 700907085H1
catgatattcgtggcagggacacccttctataggcacaaagtgcctgcagggagtaccttcactagaatggctagggtcgttgtggctgctttgaggaaatcaaaagttcctgttcctagtgactctaaagaactatatgagtttgacaaggaagagtatgcaaagaaagggagctacagaattgacacactccaacattaataantcttgacaaggcatgtgtgaaaacagattcgaacactagtccatggacgctatg

SEQ ID NO: 88631 - DNA, 78 bp, Glycine max
  Clone ID: 700907086H1
catatatctgtctctctcattgttgctgagagagaagaacccgtttccctttcttccagatgatccacttctgagaaa

SEQ ID NO: 88632 - DNA, 189 bp, Glycine max
  Clone ID: 700907087H1
ctcgagccgagggtcgtgtttccctgcttcagtttcagcttcggcttcgagaagcgtcgattgggtccttaagctgttccttctctgtttctgctttggagcatcttggagcaaatgagcaatggagcttgtggagcacggctcacctcaaggattgctctcttgacaaactgtataactccaccaaca

SEQ ID NO: 88633 - DNA, 214 bp, Glycine max
  Clone ID: 700907088H1
aactcgcatacccactggccgtttctctacatggcctcaatattcctgattttatcagtcaagaacttgggtcagagtccacgttgccatagatacactcctgagctcaacggggaaagattgctcgtgggtgccaacttagtctctgctggcttggaatcctcatgacatggagtccatttgaaacacatagaatccaagacaactggatatt

SEQ ID NO: 88634 - DNA, 259 bp, Glycine max
  Clone ID: 700907089H1
gttcaagcttgtacaacccaacattattcataacataatgttgaggctggccacagcacagttaggggaaggttcgattgacctggagtctataggaaacatagaagttacttcagacggcgctgcattgtttggtgatggagaagataaccacaatgattctgaagccgccaattgaaaaattggctcaacaaaagtccattgtctaaaaattggtgttttggtggggggtttaagtggataactcctaatagtaaga

SEQ ID NO: 88635 - DNA, 257 bp, Glycine max
  Clone ID: 700907090H1
gggagattgagactcctgaaagcctttttatctttccttctttgacttcaggtcttaaacggccattaccatctggtcttttggaaaatgagtggggaactttgttaagaagaccctttataagagttccagaaaatggaaccattgagctctcaaactcaattccaaatctctactcagaacactgatgagaatgcttttgaaaccccagctgattaacaataatggagcttttttatctgccatgcaacaagaat

SEQ ID NO: 88636 - DNA, 196 bp, Glycine max
  unsure (1)..(196): unsure at all n locations
  Clone ID: 700907091H1
gtttcttcctttctctgctctttgccttctctgacacatttggtgccttgtagagcgtgttttggcagtgaaggtggtatggcgaaggacgttgaggttgctgagcgtggctccttctctgggaaggactaccaggaccctccacacgacatactatataatgctnatgagctcacaaagtggtcctttacagggc

SEQ ID NO: 88637 - DNA, 255 bp, Glycine max
  Clone ID: 700907092H1
ccatcttcatattcatcaaactcatcaaaatgaatctgtaccactcctccaccaccaccaccacctacaccatcttcaccgtcatattcctcctccttgcaatattattcactctcacaccccacaaggccaacggtgccacgtgtcaccctgaggaagaagcgggcctgttgggcttcaaatcggtatccgatccgacccgtccggcctgctcagtaactggatatcgggtacggactgctgcacatggaccgg

SEQ ID NO: 88638 - DNA, 258 bp, Glycine max
  Clone ID: 700907093H1
aaaaatgttcccttgaaaggtaattctcctggattattgacaagacataaatcagtgagtggcaaaccaactgagcggtttttagcatcatcacctgcctcttctcaatcagtgctgaagttgaaaaaagatgccatgacaaggcattctgaggccacggacttcagagattggtgtgagaatgagtgcgttaggcttattgggacaaaagatacaagtttccttgaattttgcttgaagcaatctagatcagaagct

SEQ ID NO: 88639 - DNA, 111 bp, Glycine max
  Clone ID: 700907094H1
tatcgagataactcgaaacagtgtgatgcgaatgaagtgtcttgttttcttcgttgctgacaattttgtggagcatcggcaatgtccatagcgtacgagtatgttcccctc

SEQ ID NO: 88640 - DNA, 259 bp, Glycine max
  unsure (1)..(259): unsure at all n locations
  Clone ID: 700907096H1
caatatcatctagctagctagctagctagcaaatagcaatgttaaaaaaccaaccacaaccagattggcctgagcccattgtccgggttcagtcctaatccgaaaactgcgaagattcaatccctgaatggcacatcaagccttctactgatagaccatccttaaaaagttgtaattttgatgatgctatattccaatcatcgaccttggtggactatttggtgctgaccancatgtctcagcctcaattcgttagcaa

SEQ ID NO: 88641 - DNA, 109 bp, Glycine max
  Clone ID: 700907102H1
gatcaatatggcgggaagggatcaagtctcctactgtgggaaaattatttcctacagttagatgtatcaatttttaaatcaatggctcatttttttctttcttttttct

SEQ ID NO: 88642 - DNA, 246 bp, Glycine max
  Clone ID: 700907105H1
ctgccagtagtcatatgcttgtgtcaaagattaagccatgcatgtgtaagtatgaactaattcagactgtgaaactgcgaatggctcattaaatcagttatagtttgtttgatggtatctactactcggataaccgtagtaattctagagctaatacgtgccacaaaccccgacttctggaagggatgcatttattagataaaaggtcaacacaggctctgcctgatgctttgatgattcatgata

SEQ ID NO: 88643 - DNA, 246 bp, Glycine max
  Clone ID: 700907109H1
aagaaccccatggctgattcagaaagatatatcagtaccagggatagttgttcgactcgagttgccatactcagagatagggaaaaggatcgtagtgatccagattatgaccgtagttatggaaggtatgctaggagtatcccaacctctgctgttaacttggtgccatttaacttgcaaaaagctcaaccttcatttgctcaatatgatgctacgtttaatcagttaggtcagatgtcacaaact

SEQ ID NO: 88644 - DNA, 242 bp, Glycine max
  Clone ID: 700907112H1
caatttctctctcctctctctctctctctgagttctcctttctctctcttgagttaccatttctcattcattcataatgcactaatcataacaacaccgttcagctcaacaacaaaacctaaaataaatcataacaccgttcgttcatcaatggcggttccgctgcattcctagattgctctctttttcaccaattttcattcgttgcgtgtgtttgttcgctgagtgcgttagttattaca

SEQ ID NO: 88645 - DNA, 249 bp, Glycine max
  Clone ID: 700907113H1
ccaaatccatgatgcctatgttaagctacagatcggtaaccagattttgaagacaagacctgttcaatcaaggaccatgattctgcgttgggatcaagagctgatgtttgttgctgctgaaccctttgaggaacctctgattgtttcagtggaaaatcgagttggtcccaacaaagacgagaccattggagctgttattattcctgtagaccaaactgacaagcgagatgatgatagacttatccacac

SEQ ID NO: 88646 - DNA, 238 bp, Glycine max
  Clone ID: 700907116H1
attaactttagtagagatcttttgtagacctgtagtttactagtgataaagtgaaagatgggttcgaagatagtcatagtttctatgctggccatgcaccttttgatctcctcggaggtgttagagttagctactgcgggtggtgggggcaaccttggtgttggtggtggattatcaggtgctggtcgtggtggctcccctcgtggtcgtggaggcttccctggtggtgcgtattttc

SEQ ID NO: 88647 - DNA, 247 bp, Glycine max
  Clone ID: 700907117H1
gctgtatcttggcgcagtgaagggataaactacaagaaaaatgaggttttcttggttgaggtggagagtgttaacatacttgtcaatagcaatggacaaataattaggtctgatgttgttggggcattgaagatgagaacatatctgagtggtatgcctgagtgtaaacttggattaaatgatagagtattattagaggcacaaggtagaacaaccaagggaaaatcaattgacttggaagacatca

SEQ ID NO: 88648 - DNA, 246 bp, Glycine max
  Clone ID: 700907119H1
gcctgcccctatacctcaccccacttactattattattgtacaacataaccaggtcccagaatgctttttagagagagaaagagtaataataataaagtggaagaaaaagaattaggagagtgaaacaagaagaagaagaagaagaagaagaagaagaagaattgagaagatggtgtttgaggaaactgagctgaggctgggactgggactatgtctccctggaaatggaaccacggcaacaactg

SEQ ID NO: 88649 - DNA, 249 bp, Glycine max
  Clone ID: 700907122H1
tggaaagttggagaaagcaaggtccgggttaaccaagggtccagagtaaatatatctgtaacagatagaagccaattggaagtgtacaaaattcgagtcattagcttattaagtgtgatgatgttgggttctatgtatcgtgactgtaagaatggttccatatttggctttgctacccacctggaagaggatttaccgaaacatcatacatgacctgtaacggagtagttgtagtttttttttttagtg

SEQ ID NO: 88650 - DNA, 243 bp, Glycine max
  Clone ID: 700907125H1
cggctcgaggttttttgttcttggtcgagccttgtactgattaacgagaatggacaaggaattggagcttggttcccttgaaggtgaaatggccacccagcacatttcataaccacagaagcgttccggtggtcttgttaccatgcctttcatcattgcaaatgaggcacttgcgagggtggcaagtttgggccttttgcccaacatgatactgtatttgatggggacctacaggcttcacct

SEQ ID NO: 88651 - DNA, 241 bp, Glycine max
  Clone ID: 700907126H1
caaatacttgataggaactggggagctggttggcaccttttatctttattgcttgctactaaaccttctcaaaggataagttgtttggatgctcttcgacacccattcctttgtgggccaagatggcgagtagtcccatcaatggatattatccgatggggtctgggttctactgcaatgcgtattagggagaagtacatctatcgtcagcctcagcaaagcaggcttgcccacttcattg

SEQ ID NO: 88652 - DNA, 241 bp, Glycine max
  Clone ID: 700907129H1
atatatagtcattcacatagtactcatcattaatttcagaagcgccaatatatgatgaatggtagtggcggttttatgatgctgacgcctaagtccggcggttttcctgtggaagtcaacacccaaaagctgaaacgcactgacagcagacaaacgggcgtgttctctgtggaaaggttcatcacatactcggtggttggtatgcagcgactcctttcattgaagataactaaggtaatca

SEQ ID NO: 88653 - DNA, 241 bp, Glycine max
  unsure (1)..(241): unsure at all n locations
  Clone ID: 700907130H1
caaacaacaaaggaggacaccgaaagcaacaatcttcatcaatatactcatcttgttcatctcagctcactccttccttcatcttcctccacctcttctgccaaaggtcctttaagaaaagcatcattagaagtggtacacaaacatgggccatgctcccaactgaataatcatgatggcaaagcaaagtctaaaacaccacacagttcgatcacaanncaagacaaagaaagggttaagt

SEQ ID NO: 88654 - DNA, 239 bp, Glycine max
  Clone ID: 700907131H1
tctgaactcatctcactacattaatattcccttgggtttcattaattgtgacatttagctttttttattgaaccgtgtcaattgccgctactatgaaggctttagcttttgttgctttgcttgttaccattaatgcaatagtgtgtgaaagtagagtggcgagaaaggaccttggattggaccttggtggggtgggaattggggtgggtgctggggttggactaggccttggtggtggg

SEQ ID NO: 88655 - DNA, 109 bp, Glycine max
  Clone ID: 700907133H1
cttctttctttttttcaatttccaaatcacgaaactcgagaagatggagaaagcgatcaacagacagaagattttgcttcatcatctcaacccttcatcatccacacaa

SEQ ID NO: 88656 - DNA, 248 bp, Glycine max
  Clone ID: 700907134H1
ctgtgatattcagctcggattgaaccctcttgacatgatctccggtggctcccccgtcggctccgtcgcctccaaggtcccaaggatcggaatcctccctcgtgatgctaaggatgagtcgatgatgaagtggtttgaggtgccggggttcaacatcattcacgcgataaacgcgtgggaggaggacgagggaagaacggtggtgctggtggcgccgaatattctttcgatggagcacgcgctggaga

SEQ ID NO: 88657 - DNA, 247 bp, Glycine max
  Clone ID: 700907136H1
gcacgcttaagctcaccactccaagctttggggagctgaaccatctaatttcagccaccatgagtggtgtgacatgttgtcttcgtttccctgggcaactcaactcagatcttcgcaaacttgctgtgaatctcattcccttccctcgtctgcactttttcatggtgggttttgccccactcacatctcgtggttcccaacagtacagagctcttactgtacccgaattgacccaacaaatgtggga

SEQ ID NO: 88658 - DNA, 124 bp, Glycine max
  Clone ID: 700907137H1
ttcaaaaacaatggcaggcgccgtggtgaagaaggaagactctctcaacctgaaagtcactaacaagagtcatgttcaacctgaggagaaaattggaaggaaagagtaccagctggtcactttt

SEQ ID NO: 88659 - DNA, 243 bp, Glycine max
  Clone ID: 700907142H1
ccaagttcggcgtctatgtcaccgttcccatcattctcatgtacactttcgccaacaatcccagcaacctccgcaagttcatgggacataggtcatacattgaatatcccccagaggcagaaaagccaccatcaccggaggaacttagggaaatggcacgggagatggctcgtaaaaggaacagttcttgatgctccacgtgattgttttggctgcaccacagtggttgtgtaacagtatcac

SEQ ID NO: 88660 - DNA, 242 bp, Glycine max
  Clone ID: 700907143H1
ggtgtgatgagattagttttgagaagaaaccagcaatcggcgattaggagtgagagagatatggagggaattgaaggaaatagcagcagatacagtctgaaaccctcgcgaatttgcaacgaagatgttctgatctgcgtcgacgtcgatcctcagtgcctcgtcgaaatgaaaggtgccaccggtcccaatggcagacccctcacccgtttggactccatcaaacaagccatcgttctctt

SEQ ID NO: 88661 - DNA, 237 bp, Glycine max
  Clone ID: 700907146H1
ggaaggtgttgatatgacatatttgaaaaatgttatcttaaagctgcttgagactggtgaagttgaggtattgctaccagttattggaatgctgcttcagtttagtccagaagagatacagaagtgtcaacaggcgtatcacaactccacagatgttccaccaccaaatcctgcaagcgatacttcaggatctggcctatcgcttttctcaagattcacattttcttaatggcataa

SEQ ID NO: 88662 - DNA, 117 bp, Glycine max
  Clone ID: 700907147H1
cttaatagaagtactactaagtcttgcttccggattgcgttggctctgtcatgatctggaaatacctctacgagagcatgagtaatttttgcttaactaataagttgtataatattg

SEQ ID NO: 88663 - DNA, 248 bp, Glycine max
  Clone ID: 700907149H1
cgagttataaaaacggtgaaacgattcaagatatttcaacaggacaacctgggacgccgtttgattacggtgccggacacgtcgatcccgtggccgctcttgatcctggtctcgtctacgatgccaacgtggacgattacttagggtttttctgcgcactaaactactcgtcatttcaaatcaagcttgctgcgaggagggactatacgtgtgacccgaagaaggattacagagtggaggattttaat

SEQ ID NO: 88664 - DNA, 248 bp, Glycine max
  Clone ID: 700907150H1
gttaaacggcaccgcgttccgtccctcctctctctctgtgtggttaacagaaagaacaacgctgagatccaatcacaatcattcattttcattcataccgttcgcaacacgatcactatttctgcgacgatggtggcacattcgagttcttggggcagggcactcgtggccatctcgccctataccttctctgccatcggcatcgccgtcgctatcggcgtctccgttctcggcgccgcctgggggat

SEQ ID NO: 88665 - DNA, 240 bp, Glycine max
  Clone ID: 700907159H1
tgcgaagtatctatcagttttactgagtattatcacctctcagccatagaacctaccaagacatataatttaatataagcttccatctcctatttttattaccactaccataaagttcccatctacttaatttcatgaaggccgcacctaagtgctgatacaaaattcaatttggggttattgcttgtattgttgataatttatgtcatcatctattgctgttgttatggtatgtatacc

SEQ ID NO: 88666 - DNA, 241 bp, Glycine max
  Clone ID: 700907160H1
tgggattagcagaagttgtagcagggaaagtgttagcataatcccactagaccatttccttttcttatgaatatcattccaaccagtgccaacaattcggttcaagaccaccctcaagcaccatccaaacctgttatttgtgatctaccattggctaggaaagcttcacttcatcggttcttggagaaaagaaaggatagaattgctgccagagcaccatatcaaacaagcaatcacatgg

SEQ ID NO: 88667 - DNA, 75 bp, Glycine max
  Clone ID: 700907161H1
gcagagaaaaagcatatggtctcccgtcacagatccaagaagtggtttcaaccgggaatccagaactttccacag

SEQ ID NO: 88668 - DNA, 242 bp, Glycine max
  Clone ID: 700907168H1
gtatggattgcacacttatttttaaagtaagtagatttggtgctggctactttataggctgtgatcaacatcctaggtgcaagtacattgctaaaacattatacggtacagaggaggaagaggatgcatctcagccaaacagtagagtagaggaaccaaaactcctaggtgttactagtggttcatatgagaaggttcttttgaaaagtgggccttatggagtttatgttcagctcggagaa

SEQ ID NO: 88669 - DNA, 243 bp, Glycine max
  Clone ID: 700907169H1
tgaaaagcatgctgacacgagaaatttgttagacacacggttaaaatctatcctagagagtgttcggttgaattatcttctagaaagggagggaagcaactgggatgcgaatttaaaatgggaagacattctttctcttggagaacagcaaagattggtgatggtatgtaaatatattctcttgaaattttagacatttttttttaaatttcttaaatatttttgtttcatgcagcatgcccc

SEQ ID NO: 88670 - DNA, 245 bp, Glycine max
  Clone ID: 700907170H1
aatagccccattttctgaaatgctggaaggagcactgaaaacacatcaccagcttgtgatgctaatagaaaatgttgactttgctgatgcccagttcaagaaattcctctgtgatggattcgaaacaggaaactttggaaatttcactgaagagaactcaagccaagtaatattcatattgacaaatggtggaagtggatccactaacattgagcagcagaatgaggactcggttatgaggttgt

SEQ ID NO: 88671 - DNA, 74 bp, Glycine max
  Clone ID: 700907171H1
cttcggaattcccggtgcatattacattaagaacttcatgcaagttgagttctatctcaagtctctaactctcg

SEQ ID NO: 88672 - DNA, 240 bp, Glycine max
  Clone ID: 700907174H1
caggaagttgtctgagtcagacccccaattgcagttccaataccacagaggccttctcctcacaggcaaaatctccgtaaacctaatttggtacggtaagttcaaaccttctcagaaagccattgttgctgatttcatcacctctctctcctcttccaaacccctcaccgcccaaccatccgttgccacgtggtggaaagccaccgacaaatactacaaaaactcgttccccaaacttgc

SEQ ID NO: 88673 - DNA, 238 bp, Glycine max
  Clone ID: 700907175H1
aaagggtatgcattgacccctttgcacaaaggaaaagaggggtggtgttgtgttaaaaaaatattgaacttggttggttctaagtagaaacaaaaattgtcattttcccatttctgcatttttggtttgggagaggagaaaccaagaattaagaaatgggttgctccgtaagagtttgttgtgtcttatttttggtgttgttggtggcatgtgttagaggggaggacccttatagatt

SEQ ID NO: 88674 - DNA, 241 bp, Glycine max
  Clone ID: 700907176H1
cactttctctctctctctctctcacccagatcttgtagcaatggcgagcgctcccactccacgcgaagagttcgtgtacatggcgaagctggcggagccggccgagcgctacgaggagatggtgtcagttcatggagaaggtctccgcctccgccgagagcgaggagctgaccgtggaggagcgtaacctcctctccgtcgcctacaagaacgtgatcggcgctcgccgcgcctcctggcg

SEQ ID NO: 88675 - DNA, 233 bp, Glycine max
  Clone ID: 700907178H1
ggcatgtaggaatcgacagatgtcttagagttttctaccacaataattatgttatatgtgtcaatttcaatcctgtcaatgataattttttcatcagtggttcaattgatggaaaagtgcgtctatgggaagttgttcactgtagggttagtgattacattgatatcagagagatagtcacagctgtgtgcttccgacctgatggaaagggcacaattgtgggtaccatggca

SEQ ID NO: 88676 - DNA, 236 bp, Glycine max
  Clone ID: 700907179H1
ttgaaaaaactgttatgaagcttgttgttgatgctgagacagataaggttctcggagcctcaatgtgtggacctgatgcacctgaaattatgcagggtattgctgttgcgttgaagtgtggagctaccaaggcacagtttgatagcacggtgggaatacacccatcggctgcagaagaatttgtaaccatgcggtcagtgacaaggcgcgtagctggaactggaagtgtcaaaccc

SEQ ID NO: 88677 - DNA, 247 bp, Glycine max
  Clone ID: 700907183H1
ctcgtggatgtgtcatctcctttattcaacgtagaaatattgttattattccttcctggtattaaggaaatactcagctcttgaagctctgaatattaacagagcatcatcggcagatggggtctgaaggtcctccagcagctgtgacagttcatgtaacaggttttaagaaattccatggagtttctgagaatccaacggagacaattgtcaataatttgacggaatatttgaagaagaagggttt

SEQ ID NO: 88678 - DNA, 248 bp, Glycine max
  Clone ID: 700907184H1
gagagagtagagaaaaacaatgtcagggctgaaggaattgctgaagaaagggttaggtttaggcgacatggcgttcaacgccggcggcggagccgatatcctggttccccggccacatggccgccgctacacgtgccatccgccaccgcctcaaactcgctgacctcgtcatcgaagttcgcgacgctcgcattcccctctcctccgccaacgccgacctcccgccacacctctccgctaaacgacgc

SEQ ID NO: 88679 - DNA, 246 bp, Glycine max
  Clone ID: 700907185H1
ctcgacttcttcgttgcgacactgagagagttgagggagctggcggcgctttgacttcttcacagtgtcactctgtctctctttttcttctcacactcacgcctcacgcagttcctaagtccctagccagtacaacctcactcactttctctctttgtctctctttctctcagattcctacattgtctgcgcactggcaccaatcaaccataagatgtgcaccgtcgctgaaatcggcctcaacga

SEQ ID NO: 88680 - DNA, 106 bp, Glycine max
  Clone ID: 700907187H1
atctcaacgccccattctctttccctaacgtccccgacgacgccgtaacgtcctccccttcatggcctcttgcgacgacgacgacgacttctctctcctccgcgat

SEQ ID NO: 88681 - DNA, 117 bp, Glycine max
  Clone ID: 700907191H1
ctacccctatcttgtattagtaaaagagaaaatttgtgatgtgtactcaccgtcggtggattacctcgtagtagtaaaaagagtacaacaatgtgacgtatttttatttataaaaga

SEQ ID NO: 88682 - DNA, 237 bp, Glycine max
  Clone ID: 700907193H1
tatcgatcctttagtccttcggaatttgaagctagaggtgtcagaaaagttaccacagggataactggcttgtggcagccaagcgttcatagcgacgttgctttttgatccttcgatgtcggctcttcctatcattgtgaagcagaattcaccaagtgttggattgttcacccaccaatagggaacgtgagctgggtttagaccgtcgtgagacaggttagttttaccctactgatg

SEQ ID NO: 88683 - DNA, 234 bp, Glycine max
  Clone ID: 700907194H1
ctagaactagaactagggtttcatctttgccatcagaaacaacaatgatttacgacgttaactctccccttttccgatccttcctcagccagaagggaggctcctccgataagaggaaaacggatgaacagaagccaaaagagcagaaacccaaagccagcgagaacaaacctataatgacagagtgacaacaaatttgctgcattcagttgtagaatgataataggtggtaga

SEQ ID NO: 88684 - DNA, 233 bp, Glycine max
  Clone ID: 700907196H1
gtgctttataggtagatctgagtcgtggggtttggtttttggatgaattatagatgttggcagtttgcagattggtgtaatgatgaagcattttgacctgggggtggtttcacttgtgcgcaaaaggttttcatcattacttccttttcgtttctctctttttctctgatcaagttatgatggtgtttttgttgtcagggtgtaactacctttttcttccttcatcattagcc

SEQ ID NO: 88685 - DNA, 260 bp, Glycine max
  Clone ID: 700907201H1
ataaaaatagataatatcctctaatatatttgatttgatttagggttaccgaaatttaaatttgaaatgaaaaaaatcatttgatttggtaacaaataaaactaaaagtataaaacaaatatttctattattttgaattttatttcttatgattaggtaaaagaaatgcttaaaaaattatattttaagcatatctctgacctaatcataaggattacaattcgtaataatggttatattttcaatgatctgtcttatga

SEQ ID NO: 88686 - DNA, 207 bp, Glycine max
  Clone ID: 700907202H1
ggagatcatggcaacgggaggaattgcaagttttaaaaactatgatattgggaaactaccctgaattgagaatttttgtctttagaaacccgcttgttatttgtttttatatatcagtctttgtgatgtcatcggctatttggataataatcatctttcctttgttgtgtcatccgtattatttggatagtactcattttacctttg

SEQ ID NO: 88687 - DNA, 254 bp, Glycine max
  Clone ID: 700907203H1
agcaatctcaatggtaggtgaaggcctaatttggtttcatgaatggaaggaatcatcacctggacagctacaaacaaatttgatcatgtctagggagatcttatagtaactttctcaacgcttggaccaaaatgtttcatgtgtaatgatgtgatgctgtatgctgactgctgtttctcttctaggtactcttgtctttctgtattgtgtgtgggggtactattttgcatgatagcaaaaaaaaaaaaggtgtc

SEQ ID NO: 88688 - DNA, 254 bp, Glycine max
  Clone ID: 700907204H1
caagattgatatatattttcccctgtaaaataaacagtataatatgcttcgtcttacaaagaaggttcaagtaatcgatattcaaatgtaaaagaatagttgatgaatatcttcaagtctttggtgctgtgttattaaatgatactcagtgataaccacaattagaaaattggaagtcagctgcagtaaggtgacctttctattcattttatagaaaagaaaagaacagagtggggagagaagtgatgatatat

SEQ ID NO: 88689 - DNA, 247 bp, Glycine max
  Clone ID: 700907206H1
caaaacagcgttgaggggacaatcaagcagacaatcgagaaggccttttgggatggtatcatggaaactgtggagggggaccagcccaactatgactggattgttcaacttatgggggaggttagggatgaaatttgtgagatggctccaaaaagctggaaggaggatatttttgctgccatcgatttagaaattctttcacaggtgctgaaatcagtttgcagaagctctcagctccagcgaatga

SEQ ID NO: 88690 - DNA, 251 bp, Glycine max
  Clone ID: 700907208H1
gccagcgagtgagtgagcgagccaggtagggttttcggtgttcccctctttgtgttcgttcgcgacgatggggtccatccccgatccaggcgagttgagcgagttgactcagccgagcttcgacgagttccagcgccaaacctctctcatgaccagctgcaccctcctctggaaggagctctccgaccacttctcctccctcgagcaagacctcaaccacaaatccgaagccctcaagcgcaagattcaca

SEQ ID NO: 88691 - DNA, 254 bp, Glycine max
  Clone ID: 700907209H1
attttgtgaatgtgtttttttccttcctttatattgcatcaaggtcccatttacgccttactgcttatatgtttcagttcttctgttattcatgatactgaactctcaccagatgtccccaaactttctgctctggctggtgcttggtgttttcttgatggcaacaatgttgaggatgtatgcaacatgtcaacagcttcaagcacaggcccaagctcatgcagctgcagccagtggcattcttggccacacag

SEQ ID NO: 88692 - DNA, 254 bp, Glycine max
  unsure (1)..(254): unsure at all n locations
  Clone ID: 700907210H1
tttcttattccttctggaatccttccctttagtttcatgcgcaaggggaagaagcaattcatttgactcttactttattatttgatttgccggcaccctcttcttcacgggttttcttctcactctacttcatgttcatgcctttctgttccatcaccatgtgcatgccctntgtttatccaagattgagtctttaccctatttgcttattttccaggagctgaaaaaaaatgggagaaagtgctttgttctct

SEQ ID NO: 88693 - DNA, 251 bp, Glycine max
  Clone ID: 700907211H1
gaaagattcccaaaacacgtttgctatgctgacaaccttcaatgaagttgatatgactaatttgatgaagctcctttctgattataaggatgcttttgtttcaaagcatggagtcaaattggggcttatgtctggctttgtgaaagctgctgttaatgcactccaacatcagccgattgtcaatgcagtcattgatggtgatgatattatatacagagattatatagatatcagcatagctgttggtactt

SEQ ID NO: 88694 - DNA, 256 bp, Glycine max
  Clone ID: 700907212H1
gaaccctaatttacattgcaattgggttggtagggagtgtagggcagattgcgtagaatcggaagatggaagaggaagagcacgaggtgtacggaggagagatccctgacgagggagagatggaaggagacattgacatgtccgccgccgacgatgacgccgccgtcaaggagctcgacgagatgaagcgccgattgaaggaaatggaagaggaagccgcagcgcttcgcgagatgcaagccaaggtcgataagga

SEQ ID NO: 88695 - DNA, 257 bp, Glycine max
  Clone ID: 700907213H1
ctcatttcttctcatcttctttttcttccctttaaaattattattccgtgcaaacacaacaacaacttcatcaccaacacgaagaacaagattagcgttatgggtctcttcctttctaggaatttggcttgcaaattcatatacccttttcttttttccaataaggtttcaaaggatttgttccccaagcagttggagaacatgatgtctctggtctctcctcgtactggcaggcatttgcagcgctatgacaaagg

SEQ ID NO: 88696 - DNA, 256 bp, Glycine max
  Clone ID: 700907217H1
aatcgattacactgatcctgaagagcttgagttgttggtcagaactcttatagatctggatgcaatggatggtcaacaaagtgtttctttgttggcagagtgttctagttcccctgatgtcagcactagacgggctttagcgaatgcattggcagcagcaccatccatgtggactcttggaaatgcagggatgggggcattacagagactggcagcagatagcaacccagccattgctgccgcagcatccaaagct

SEQ ID NO: 88697 - DNA, 255 bp, Glycine max
  Clone ID: 700907218H1
cttgatccttctttttctccttgaactcaaacatggcagatgaggtggttctgctagatttctggccaagtccatttgggatgagggtcaggattgcacttgctgaaaagggtaccaaatatgagtacaaagaagaggacttgaggaacaagagtcctcttctcctccaaatgaacccggttcacaagaagattccggttctcatccacaatggcaaacccatttgtgaatccctcattgctgttcagtacattg

SEQ ID NO: 88698 - DNA, 253 bp, Glycine max
  Clone ID: 700907220H1
attctctttcagtttttggcattgaagaatctgagatcggaaaattcacctctccaacccccaatcccatcgttgcaaatgatccgattcattctgttgcagaacaggcagggcaagacccgtcttgccaaatactacgttcctctcgaggattccgagaagcacaaggtggaatacgaggttcaccgcctcgtcgtaaacagagaccctaaatacacaaatttcgtcgagtttcgtacgcacaagataatat

SEQ ID NO: 88699 - DNA, 254 bp, Glycine max
  Clone ID: 700907221H1
atccaacaacattcgatctttatgatgattcatcaactacatcatgtccatattacttcaaatggatccatgaagatctaaaaccatggaagagtaaaggaatcacaagagacatggttgaaagaggcaaaaacgtttcccattttaggcttgtaattgtaaatggaaaagcttatgttgaaaagtatgacaaagtgtatcagacaagagatgtgttcacaatatggggaattttacaacttctaaggttatac

SEQ ID NO: 88700 - DNA, 109 bp, Glycine max
  Clone ID: 700907222H1
agatgatccttgctctcttaaagattcaatactgggtgtgcgtgaagataatccacttagaacacaatccatattcccaagtcaaacatcagctgcaccctgtaagggc

SEQ ID NO: 88701 - DNA, 255 bp, Glycine max
  Clone ID: 700907223H1
ctcgctctctgatctgttttgtttcaggagccacccgctcctgcagttttcttttgcggttgtgagtggaaggccattctcgcaacgtttgagttcagcagatccagaatttttcagaaaacaggtttaggagaatgaagaatacggaacgaattgccaatttggctttagcaggtttaaccttagcgcctcttgttgtgaaagtagatccgaatttaaatgttattttgactgcttccctcactgtgtttgtgg

SEQ ID NO: 88702 - DNA, 107 bp, Glycine max
  Clone ID: 700907224H1
acttctccttggttgcaccatgtcttgctatgtgtaggatcttgtgtaccttcttaagctttgagcaattcccttgtacttttatttcactccatgatcatcagcca

SEQ ID NO: 88703 - DNA, 253 bp, Glycine max
  Clone ID: 700907226H1
cttctgagctttgattagtgtggcctagttgttgttttctcgatgagaaaggcttcttccactatgcattccgatcttctgcgattttgggttcccttgttgctgcttgctagcttcagctatgctccttctgtttcggccacaactgaaatttcacggaatgaagtgaacacagatgggaaggtgataaatgaagagttagcacaaccaagtctaaaaggacatgatgaagaagcaaagttcaaaggatttt

SEQ ID NO: 88704 - DNA, 255 bp, Glycine max
  Clone ID: 700907228H1
ctcggctattgcaacaccatctgcccagattcgattccatgctgccgatcgactaaatacagcatgaacttagctctttattcagtgttattttgtgttcacgcagtctttgcagcaagttctaatgggcatggacacaaatcacaagactggttaaaccatggtggagatatgttcaacagaagatatgcttacaaagagcataagatcagcccaaaaacagcaccgaacctacgtttgaagtggaaattcaat

SEQ ID NO: 88705 - DNA, 257 bp, Glycine max
  Clone ID: 700907229H1
gaaagaaagaaactgcaacttcctctgttttgctcccctgtttaggccttttcataagcttagaatgacacacaagtcattttccattgctctagtgactctcattgctgttctctttgtcaacatgaacatccaaggtgccactgctgactatggtagttggcagagtgctcatgccactttttatggcgggggtgatgcttctggcacaatgggtggagcatgtgggtatggaaatttgtatagccagggctatg

SEQ ID NO: 88706 - DNA, 262 bp, Glycine max
  Clone ID: 700907231H1
caagcgacgccgtttgggtcctcttccacctcgccttcttctcccaatgccttccctccgcctgggcccactcggcgatcctcctcccgggtcaactcgcccgtgactcaccgcagagctgccccgcccctgaccccaacctctactacaagccagtcatcggaatcgtcagccatcccggcgacggcgcctccggccgcctcagcaacgccaccggcgcctcctacatcgccgcctcctatgtcaaattcgttgaggccgc

SEQ ID NO: 88707 - DNA, 105 bp, Glycine max
  Clone ID: 700907238H1
ctcgagccgcaaaagtcaagcgaagagtgacttatgtatcaatagtagtctagctttctcagaatttgaagttacaacctccctattggtcaactgaactggtga

SEQ ID NO: 88708 - DNA, 251 bp, Glycine max
  Clone ID: 700907239H1
caaagcttctgaagtggctgatagtaaaacttgccttaatggtgactccaactccatatgccccagtcataatgagcctaatacaccacatgcaattcctactgaaatcaatagtggattagacaatgagaatagggataatgaaaagcaggctgttgttgcacatgcagataatggacattcgatctcaaagaacttgtactttttggaccctgatgattcatataatggtaatgagtcaggaacagaag

SEQ ID NO: 88709 - DNA, 252 bp, Glycine max
  Clone ID: 700907242H1
gtagaagccaggctgagccatcttctgattcagccaaagtccaagaactgagtgtgtatgagatcaatgagagagatcgtggaagccctgcttatcttagattgcgccagaaaactgtcaattcccttggtgatctagtccccttcagcaacaagttgtattctggcatgtttgcaaaagagggtggggataacagctggaatctgtgtcttgatccaaaacaaagccgagaagaagggagataggtatgag

SEQ ID NO: 88710 - DNA, 54 bp, Glycine max
  Clone ID: 700907245H1
ggattcggctcgagtcgagcgattcggctcgagaactatcttcttccaaataaa

SEQ ID NO: 88711 - DNA, 231 bp, Glycine max
  Clone ID: 700907248H1
tagacattcaattttatggatgaataattaatatagaacaattaatgtaaaaataattacatctaagcacagagagagagtaagagatgagtaattggaattgcgagggcagatgattgaatgaatatttttggccattcctaaaactgtccgagcttaataccttggaatcttggattttgcattgcgcagatgtgaaactattccaaagtcagttttcagagaattgtt

SEQ ID NO: 88712 - DNA, 108 bp, Glycine max
  Clone ID: 700907249H1
cttttgttctacatgaacgatcagttattgatcaccattttagtggttgattgttcttaaattgaaaagaattttaccagtaatgattttatttatgataaattattc

SEQ ID NO: 88713 - DNA, 252 bp, Glycine max
  Clone ID: 700907251H1
ctcaagcgtcaattctccatcgccaatcctctctttctgctgatttcggactcgtcacttacttgtgaaatgatgctctcagcggcaataattacttttggacgctggacataaggcgtgatgggcggttgctgttgttgttgttgttctgctaaggagactgtgttgagcgctccacctgcgtactattatcagtatccaagagcatcagaagagcatgttcctctatcatctcaccagggtgctgcttct

SEQ ID NO: 88714 - DNA, 250 bp, Glycine max
  Clone ID: 700907252H1
gaaagtgagaggagagagaaagtagcagatcctccatggcctccaccaaggaacgtgaacacttcgtctacgtcgccaagctcgccgaacaagccgaacgctatgaagaaatggtggaagcaatgaagaatgtggcgaactaaacgtggaattgacggtagaggagcggaaccttctgtcggttgggtacaagaacgtggtgggtgcccgtcaggcttcgtggaggattctttcctcgattgaacagaaa

SEQ ID NO: 88715 - DNA, 174 bp, Glycine max
  Clone ID: 700907253H1
cacttcacaaagtttttgttgctttcaactaatgtgttgggtgaatcgtattttcacgccaaattttctttcaataaattagtatagtatataaatctttttgtaactacatgtgtggttctatgccacttcttgtgacagccacgctttttaatataatgtcactttgctttg

SEQ ID NO: 88716 - DNA, 250 bp, Glycine max
  Clone ID: 700907255H1
ctcttgctgagaagatgatgatgtttatgcttgcttccttcttgcattcttttgagtggagattgcctagtggcacagagcttgaattttcaggcaaatttggtgttgttgtcaagaaaatgaaaccattagttgttattccgaagcctagactatctaaaccagaactctatcaatgatgttgtaatagtgaaatgcatgcttattacaacttatataataagatttgttacttgcttcggctgagtta

SEQ ID NO: 88717 - DNA, 252 bp, Glycine max
  Clone ID: 700907257H1
tacctcgagccgaatcggctcgagcggctcgaggttaaggatccatacgctccccatggagtacggcttttgattgaggactatccttatgcttctgatgggctagagatatgggatgccatcaagtcctgggtgcatgaatatgtctcattctactacaagtcagatgcagcaattcaacaagatcccgagctccaagcttggtggaaagaacttgtccaagtgggtcatggtgatttgaaagataagcca

SEQ ID NO: 88718 - DNA, 251 bp, Glycine max
  Clone ID: 700907258H1
cttagagatgaagaatgtgatagacaagccgtgaaaagggccttggcttttgttgtagcctggtccttagatcacttggtttttggtgagtaccctccttagatgcactctattctcgggagtcagttgccaagattctctcctgaggagaagagtctcataaaaggcagcatagacttcattggcatcaataactatggaactctctatgccaaggactgctccctcactgcttgtcctcttggaacaga

SEQ ID NO: 88719 - DNA, 252 bp, Glycine max
  Clone ID: 700907259H1
gagcgcagcgtacagaccgactacacgctgcgatgtgaccgcaattctcgttttatatggtcttccaaggttgcttactggatcaatcctagctcatgagatgatgcatgcatggctgcggcttaaaggttatcggactctaagtcaagatgttgaagaaggtatctgtcaggttttggctcatatgtggttggaatctgaactttcttctgcatcaggcagcaactttgtatcagcctcatcctcatctgc

SEQ ID NO: 88720 - DNA, 252 bp, Glycine max
  Clone ID: 700907261H1
aggaattcatggaagccttggctgctggtgctgatgttagtatgattggacagtttggtgtggggttctactctgcatatcttgttgctgagaaggtcattgttacaaccaaacacaatgatgatgaacagtatgtttgggagtctcaagctggaggttctttcactgtcaccagggataacactggtgaggttcttggcaggggtactaagatcactctctacctcaaggaagatcagcttgagtaccttg

SEQ ID NO: 88721 - DNA, 257 bp, Glycine max
  Clone ID: 700907263H1
tttcactttgcaggcttttctagaatggaagaatgcaagttgagaggaagtgtccgagtatcagaaacagattggggagcagtatcttgccaatgttgagaaggcattggagagatggcagaatgcaaggaacgcaaggtcagttaacaatgaccagaatttacaggagacaatggacaaagagttggatactcataggctggagcatggtcccaagaaaagaaagatccctgacgaaaacaataatgacgacgatg

SEQ ID NO: 88722 - DNA, 253 bp, Glycine max
  Clone ID: 700907266H1
gctagaagcaataagatgaaaatgaaagtgcttgttttgtgtgttgctacagttttggtagcatatgaatgcccatggtcagactaccaaaagttccctcttcaaatgtgaaactgggtttggtgggcaatacagcaatgaggtggcatgtgccagtttgaaggttggcctggaagcaaacaacgtagtcaagtggcaaactgttcctgcagcttgcggagagtacatagctgactacgttctaggagaccaa

SEQ ID NO: 88723 - DNA, 250 bp, Glycine max
  Clone ID: 700907267H1
caaaaaggaaaagaaaaccaatatgaagttcactataatcacaatatttttctctttatttctacttgactttggttttgcacaacagggggatcttgacatatcaagatttggaggaaaaccaaatacaaatataggccaggctttcttaagtgcctggactcaagcatgtgcatcaccaactgctgtcaaaattgtgattccagctggcacataccaaatgggtgcagctgatgtcaaaggtccttgc

SEQ ID NO: 88724 - DNA, 248 bp, Glycine max
  Clone ID: 700907270H1
ctcgagccgcaaaagtcaagcgaagagtgacttatttttcaatagttgtcttgttttctcagaatttgaagttacaacctccctattggtcaactgaactggtgattacttgtctgtgttttgtaaaaaacaatagtgtatggttcttcttcctagttaaaattccctaagactaaatttaattgttaaatgtatcaaaaaaaaaaaaaaaaaaaaagggggggccgccactagttgacccagacgcc

SEQ ID NO: 88725 - DNA, 250 bp, Glycine max
  Clone ID: 700907271H1
tggatcttcaagaaagagagacccttgggatttcgtcaccatgagtctcttcggtcttggaaacagaaaccaaaaaacatttcgtccaaaaaagagcgctccatctggaagtaagggtgctcaacttcaaaaacacatagatgccacgttgggtagtgggaacttgagggaggctgttaaactgccccctggtgaagatattaatgagtggctagctgtaaacactgtggacttctttaatcaagtgaat

SEQ ID NO: 88726 - DNA, 250 bp, Glycine max
  Clone ID: 700907273H1
caagttggtttatgttcttccaaaaggcatgaatctaagagtgctggaattgaaatggtgactgaaaaggagcagggagagttgacggcaagagataatcctttgtgttcttcttgtcagatgcttgttctttggatccagaatcaactaaaacaaaaggcaacgaaggacagagtattcaactatgtgaatcaactgtgtgagagcctaccaagtccatctggagagtcagtgataagctgtaatagtc

SEQ ID NO: 88727 - DNA, 251 bp, Glycine max
  Clone ID: 700907274H1
caggaagttgtctgagtcagacccccaattgcagttccaataccacagaggccctctcctcacaggcaaaatctccgtaaacctaatttggtacggtaagttcaaaccttctcagaaagccattgttgctgatttcatcacctctctctcctcttccaaacccctcaccgcccaaccatccgttgccacgtggtggaaagtcaccgacaaatactacaaaaactcgttccccaaacttgcactctccctag

SEQ ID NO: 88728 - DNA, 251 bp, Glycine max
  Clone ID: 700907276H1
tgattatcttgatgctgctgatacacctggatggtattgtggacctaatttcttttcaactgatgtgctccgtaattttgccaagacccagattgattacatccttggaaataacccaaggaatatgagctatgttgtaggttttggtaatcattacccaaaacatgttcaccatagaggagcatctataccgaagaacaagatcaagtatagctgtaagggtggatggaaatggagggacacttctaagc

SEQ ID NO: 88729 - DNA, 202 bp, Glycine max
  Clone ID: 700907277H1
gtgaggcccttatttatctctctccgccaaattctggttgggattggttcttcttccacttccaacgccatgcctctttctggaattttccagataccctcatttatggacataatcactgacctcgccatgttcattactccgctatggattgcggttatcgtcggcgtcgtcgtgggctgggcttggaagcccaattggg

SEQ ID NO: 88730 - DNA, 254 bp, Glycine max
  Clone ID: 700907278H1
ggttggattcagtgtggggaagaggacgaaagtttattacaaggaaagacagtgatgctggcgatgcaggtaaagcactggaagaactcagagcttctctctacaatgagatccgaacatcagaaggagccaagcgccaacagcaaagatattgtggaccagtggtggcactgtccttcaattttatggtttctgttgggattatcatggcaaacaaattggtgatgggtaaagttggcttcaactttccaatt

SEQ ID NO: 88731 - DNA, 251 bp, Glycine max
  Clone ID: 700907283H1
gttgaaaggtaaccaggtgctgctttattcttgactgctcgagaaggtttctcaggagttcatcttcaatattctccagtttactttaccaaatccagggaatgctgaaagatgtggttgaaagtaaagagttccctctctcaggttaatgaggttgtagctccatctgaggtagccttattaatccttgatgagattggatgtttagatcactgccaacatcaattatatgctcatttgcctgaggtggc

SEQ ID NO: 88732 - DNA, 78 bp, Glycine max
  Clone ID: 700907290H1
actgacccgagctcccatgcctttgttagaggtaacaaatgcgcaactatccttccggtattcactgacaatcccaat

SEQ ID NO: 88733 - DNA, 254 bp, Glycine max
  Clone ID: 700907294H1
gaagaaaccatatcatgggttcagaaaattgtatagataagacgcactttgtggcggtgcatggggcatgccatggagcatggtgacggtataagctcaagccacgcttggaatctgctggccacaaggtcacagtgcttgaccttgcagcttctggagccaacatgaagaaaattgaagatgttgacactttttcacagtatactgagcctttgttgtttctattggacacaattccctcaaatgaaaaggta

SEQ ID NO: 88734 - DNA, 108 bp, Glycine max
  Clone ID: 700907295H1
gcagtaacccacgttgtggctgagatgatgtcgaattgagacaagcattaatttcagcgctgaattgaatattgagctgagcagagtatcggcatagcgtagccatgg

SEQ ID NO: 88735 - DNA, 249 bp, Glycine max
  Clone ID: 700907309H1
gccaattgccatttcaatccccagtttcttcttcaacgtcctcttacgagcagatcgcaatgctccttcccagtgtcaaaccctaattccctcattcccatggcctcagaagagctcactgtcgcggcggaacccgctcccgaacctgccaccgccgagcctcccccggaagagaaggaggagcccaaacctgaagccaatgctaagaaaaccaaggagcccaaacctgaaaaggtttccagaccacgc

SEQ ID NO: 88736 - DNA, 273 bp, Glycine max
  Clone ID: 700907310H1
ccaagttcaaggggctgatgtgagcaaagtgagtaacaacagtgttagatctcagtcacaacaccggagccattctatttctagctctgatcatcatcacttagcaaaccctgcacttggatctgtccgttcgcttggagacaccattttattgattgttgccctttgtgcacattctgtgtttgagggcttagcaattggagttgctgagaccaaagcaaatgcatggaaagccttatggacaatctgtctgcacaagatatttgcagccat

SEQ ID NO: 88737 - DNA, 268 bp, Glycine max
  Clone ID: 700907312H1
gtaatagtcgatggttcttcagattttggtttgaagcccaaaattagttttagtgatatggggactgcatcatctatgttaactcaatacgacatcgaggaagttcaggaacactgcaataatgtattttcccagcaggaaattgtgtccttgtatcaaaggttttgtcaacttgaccgcaatgccaagggatttatttccgcagatgagttcttgtctgttcccgaatttgccatgaatccactttctcagaggctgctaaagatgg

SEQ ID NO: 88738 - DNA, 270 bp, Glycine max
  Clone ID: 700907313H1
atgcgttcttgctctcaacaacaatcacacaccgccatcgaagccttcgttcttttcttcttcgttctcctttttgctctcgttcgagggttctttcgtggggaacactgcagatttcaccacccgggtcttattcatccgtgcccatgtccgaagttctcggctttcccggagttgacgatttttgccctatgggatcaatatacgccaaccccaaggaagcaagtttcttcttgtcccttggccctcaagttgatgtatactttcctc

SEQ ID NO: 88739 - DNA, 268 bp, Glycine max
  Clone ID: 700907316H1
gctctgaattcggctctcgtcagaatacattcctggtaatggtgtggtcttcttattctacaaatggtaaatcattctaacatttcaaccaatctgtactcaagttcaagtgcttccatctgccgttagctgcatatctagttgatcagagcaatgatgaacatcgtgccttttgtccttagttttcaaacgagagaaggagactgacctcttgtgttctttcctgcactgggtacaatacaactgggactattgcattctcttcctc

SEQ ID NO: 88740 - DNA, 268 bp, Glycine max
  Clone ID: 700907318H1
tctgtgacgttgccctattcaattactctatctctctctctatctctgtcgcgatcggctttgccctagaaaatactatactagagagacatcgattgcgtgaaacaagatccgtgaagattgcatcaaagagagagcatggagcgtgattgcagaggaatcgcgtcccatgcacactgacgtccggacgtcaaaggcctgtgagtatcgggattacctaccagcttatcatcctcgtaatgttgctgaagcagattcccccttggat

SEQ ID NO: 88741 - DNA, 273 bp, Glycine max
  Clone ID: 700907320H1
tgttttatgagtttgctcttgatcaatctgaaaggttcccaactctgaacagatcgatacagatgcaaactaacctccatcgagtgtcagaatttgctgtaactgctaatcaaacagtcgatgacggcaatgttgaagcaagaacttctgttaagagagttcgtgaacatgacactgagacagagtcagacgctgatgacattgttagtagcagtacaatccctgtagctctgacagacctaaatagccatgggattgataccacagatttct

SEQ ID NO: 88742 - DNA, 273 bp, Glycine max
  Clone ID: 700907321H1
tcgagaacacggagcgaaaaagcgtcacgagcgagatcggcatgaagagtcgagaggagagatagggagagcgagcgtgagaggaagatcttcgatttagagttttcaatttcgtattcagcaagtcggcgagtgtgagatttttagagagagagaggtgaggacgctgagtgctctgctgagagattccataaccccaagaggaagaggaggaggagaaggtggatagattttttttcctgtgtttttgtgctgtttatttatcctcagagc

SEQ ID NO: 88743 - DNA, 270 bp, Glycine max
  Clone ID: 700907322H1
cttcttatagcttcatcccaaaaagctcttttccttctaaattcgattccttagttcagcattctattattatgtatggcttcttcaccttcctcagaaaacaaaaacctagagggagtagctggtggtgccggagagaaacccattccacttggtgagaacgttctgcagaagcatgctgcattctttgacttgaataaagatggtgtcatctacccatgggagacttttaaagggttgcgtgaaatcgggactggggttttgctgtcc

SEQ ID NO: 88744 - DNA, 271 bp, Glycine max
  Clone ID: 700907323H1
agaacacaaaatgtgacttacaaggtcatgtttacgcttcacatcgacaagggtcttcttctatgtgcaattccaaggtcatgaatagtggctaacagatcatatatctctagtgtttcagtttcactttgctatatagatttctaatttgcaatatatgactctgccatgttgctaggtgaagaagacattattttcaagtgtgtttatgaatgtatatatttccaaaagccctttttttttgttaatgtttatggaatttcagactttt

SEQ ID NO: 88745 - DNA, 275 bp, Glycine max
  Clone ID: 700907324H1
gcataaccatgtggcggagactcttctcttcttcaaacctcaaagccctacacacaacactctctccttctcgtccccgactcgccgcccagactctcctcgcccgccacttcaccgcccaatcaggtgcttcttccctcaaaaagagggttgaagatgtcgtgccaattgctaccggccacgagcgtgaggagattcaggccgatctcgagggaagggatattcttgaaataaaccatcccgtaggtccttttggcacaaaggaagcacctgct

SEQ ID NO: 88746 - DNA, 271 bp, Glycine max
  Clone ID: 700907326H1
ctggcgactcagatcctctctcgcatcttccccaaaaccctatcccccttcctctcccgttctctctccaccgccccctctcctccctccctctccgcgctctccttcctccgccgcatctccgttgccgccaacccctccctccaccgcgccctcctccccaactctccctccctccgcgccctctccacacgcgccactacctcctccctcaacgaccccacccctaactggtccaaccgtcccccgaaagacaccatcttgctcgacg

SEQ ID NO: 88747 - DNA, 270 bp, Glycine max
  Clone ID: 700907327H1
caaaaatggcacctgcaacactgtctctgtctctcctcctcctgttctcactcagcatcgccgtaaccgttagatcgagcgactacgactacgattgtgtgtacactgcatacgttagaaccggttcggtgttgaagggcggaacggactctaagatcgggctgaagctgtacgacaagtacggctactacatctacattaaaaacctcgaagcatggggcggcttgatgggcaagggctacgactacttcgagcgcggcaacctcgaca

SEQ ID NO: 88748 - DNA, 270 bp, Glycine max
  Clone ID: 700907330H1
ctaaactcatattccaaaacgcagagccaaaccatgtcgttccccttcaaccactctcacgccacccacacccaccaccgcagggacgacgacgacgacgaacgacccaccgtttaccctccgccgggaaactccttcagcaacccgccacctccgttctacggcgtccctcaaccaccaccccctcagccggagacccacgtgttccattccgctcacgtgacaccaggacacgtgtcccatgacttcaacaactactccgctcccccg

SEQ ID NO: 88749 - DNA, 267 bp, Glycine max
  Clone ID: 700907331H1
ggggctattgctggtgcttattcaagggcatacaaggaaacttttacactgacatatgtgactggtagaactgttggaattggagcttatcttgctaggcttgggatgagatgcatacaaaggcttgatcagcccataattcttactggtttttcagcattaaacaaacttcttggtcgggaggtttacagctctcacatgcaacttggtggacctaaaatcatggcaactaatggagtcgttcatcttacagtttccgatgatctt

SEQ ID NO: 88750 - DNA, 270 bp, Glycine max
  Clone ID: 700907332H1
agctcatggaagctgtggatgactacattcccatccctcagcgccaaactgaacttccctttttgctggccattgaggatgttttcaccatcaccggtcgtggaactctcgccaccggaagggttgagagaggtactattagggttggagagactgttgatattgttggtgtgaaggagactaggaacaccactgtgactggggtggaaatgtttcagaagattctggatgaggctttggctggggacaatgtgggcttgttgcttaggg

SEQ ID NO: 88751 - DNA, 243 bp, Glycine max
  Clone ID: 700907334H1
gtcccttgctctgtgtcgtcgtaacacaaaaagcggaacagagagatagaagcacactacgcaatgacagcttttgatcttcacaagacatagcttcgtgtgtgcgtagattttcttccttccagcttggaaagactgaagtctctgtctcttccaggtcatagtggcttcctcgaagatgatggtagccaatagctttgatatatatcgcaaggacagattgtcctctgcggcggaagaggt

SEQ ID NO: 88752 - DNA, 273 bp, Glycine max
  Clone ID: 700907335H1
gattgatgtggtccaataattacaatcttgtaacagcagagtttgcgtggcattttttccatttattccgaccatccaatttgctactcctacttgtcaaaacaacaaatgcgaacacagaaaatactagtagtatcaaatttaagaacccgagaccaagagtactagaaaaataaaataaaacactacatataaaattagagagaaggagagcgtgagtgtgtctgtgtctgcgcttcagaaatgtggcggtgcgtggctcgtgctattcgc

SEQ ID NO: 88753 - DNA, 271 bp, Glycine max
  Clone ID: 700907336H1
gagctattgtatgactatgaggtcaaaatcaaccaagctgttttccctggactgcaagggggccctcacaaccacactattactggtttagctgttgcattgaagcaggccacaactccttaatatagagcatatcaggaacaagttctcagcaacagtttcaaatttgcacaggctctaagcgagaggggctatgagctggtttctgggggaactgagaatcacctggttttggtgaatctgaagaataagggtattgatggctccagag

SEQ ID NO: 88754 - DNA, 269 bp, Glycine max
  unsure (1)..(269): unsure at all n locations
  Clone ID: 700907338H1
agaacatgtgtacttaaattacttacaaaaattaatttcgacagctgtgtgtnatctatgtgaataatgtgatgttttcctcatatgtggttagaagttgctacttaatttctctgctaaatatagtaaaccttttttcagccttattcttgtgaaaatcacaggttaccagagttttgtgtgtgttgagttgataatgatgacattggtacataaaatcattcttgtgctactattatcttctctgtatgtcactgatagttcttgag

SEQ ID NO: 88755 - DNA, 269 bp, Glycine max
  Clone ID: 700907339H1
tgaaactgtgatttcaattcttctgcttgtaacataaccaaatgatgatgccattcttctattctatgccacaatcatgagtttggttcactttggatacatagtgtgcaataattctaatgggtggttttgttgaacacattaattcaggtgaccatcatgaaactcaaggttgatcttgagtgtgagaaatgctacaagaaggttaagaaacttctcggcaagtaccctcaaattcgggaccagaagttcgatgagaaggaaaacat

SEQ ID NO: 88756 - DNA, 272 bp, Glycine max
  Clone ID: 700907340H1
gagggagacaaaattgaaaatcaagattggttgcgcagagagagattttgaagttgtttcgtgtcgtgtggcgtttctgggaattaagtgcttttcttctgcaaccacagtctcattcatcaatcaatcggcatcctcatgtctgacgcttattggagatacgccgccgaatcccggcaggccccctcttccatcgccggcaagcgctctcgttccgactacgatgtttctggcgttcacgacttgcccggttactttccccatgacgatga

SEQ ID NO: 88757 - DNA, 272 bp, Glycine max
  Clone ID: 700907341H1
ctcgagccgaatcggctcgagttgattttggcacaaaacttacattacttcattgcttggcgccttaacttcgtgttcatctaatgcatttttaattgttctacacaaataaatgttttggagttcatttttggttgatttgattgctttgtgttagcaattcagggaggaactgttgatgtggattgaccctgcactgctctcaatttgctgccgaaggaaagggttgggattggttgtggcttgtccaagtacacagcgtgctgcacggg

SEQ ID NO: 88758 - DNA, 268 bp, Glycine max
  Clone ID: 700907342H1
tccaaatggccctttacattacactaataattggcctcctagtaaacaccctagtactctataaatagcatttgcatgcaccttagtcttcaccaaaatactcctcttggcatcttgtgttgtgtccctcttttaagctatttccttctcttaacacaattggttgtgccaattgccatagtcaccaaccaattaacaaaggtatatatatcatcatatcatcaccaaatgacaaatattgggttgttttttcttgtggtggtggcta

SEQ ID NO: 88759 - DNA, 168 bp, Glycine max
  Clone ID: 700907343H1
gtcctgaagcactggatcttattgatcgattattgacagaagatcctaatcaaagactaggatccaaaggggcatcagaggtaaagcaacatgttttcttcaaggatataaactgggagacacttgccaggcagaaagctgcatttgttcctgcttctgagagtgctc

SEQ ID NO: 88760 - DNA, 268 bp, Glycine max
  Clone ID: 700907344H1
gagaggcctgcccaacagtaaattattataatatgcatatggtgctgcagctgtgctgatttggcattttctggtcttgttgcttgcttccatttgatgtgtacatagaggagcaagcttagctactttcggcaaatgaactcagagacccaaagatagcgagtgttgtatgttttagaactgagactgatagtatatatctgtgtattggatttgtcatcttggcttgctgagcgatcttgtcaaatgatgtaggtgatttattttg

SEQ ID NO: 88761 - DNA, 269 bp, Glycine max
  Clone ID: 700907346H1
gtctacttcaccaagcacttttggttgcagctttggttaatttccaatatggtgtttcctctcctatctatctttgctttactcaatcttgcagtggtggcaacccatgcagaaaccttgccccctgaagtttactggaagtcgaagcttcccaccactccaatgccgaaagccattacagatatccttcacccagatttggcagaagacaaaagcacctctgtggccgtaggaaaggggggcgtaaacgttaacgcagggaaaacaaa

SEQ ID NO: 88762 - DNA, 269 bp, Glycine max
  Clone ID: 700907348H1
ctctaccactccgattgcatcacgccgtggatagaactcaactcgtcgtgtccgctatgcaggtttcggttggaggaagaagaggaggaaggtggtgacgccgatactgacgccgacgccgttatgacggagatcaggagggagatcattgcgaggctgacggagctgacggaggaggatttctacgggctcaggaccacgctcagccacattgcctcgcgccacgcgctcatcgaagagaaccagaatcatcgcgcgcagattggcga

SEQ ID NO: 88763 - DNA, 272 bp, Glycine max
  Clone ID: 700907350H1
ttcgtcctttcaggctttccctgatgctttgtttcaccaattgctcctggcgatggctcatcctgaccatgaaacacgagttggagcacacagcatcttttctttagtgcttatgccatctccattttctccccagttagaccaaaaaacaaaggggtatcagaaggtaccaagcgaaagcttctccattcagcatgaaagctttttaggagcagaacagatcaatgggaaacctatggaaggacaggcagtagttggtgttagtgggaaat

SEQ ID NO: 88764 - DNA, 264 bp, Glycine max
  Clone ID: 700907351H1
gaagcttatgtggttggttaacgtggttctaaattgtagttggatggggtaatttgttgttaagtttttaatctgtttgttcccgttagcaacatacgacaatatatatatataacattgttggttctgtttttagctttattaaaatatcaatgaagattcaggaaatttgtattctcgggtcttcatactaatggtttagtgtgttctggggaatgtctgtaaattttattttgaatcataagtcatttatatttagacaaa

SEQ ID NO: 88765 - DNA, 267 bp, Glycine max
  Clone ID: 700907352H1
ttgaagatgatcaaaggttgctagtatatgaatttatgcctcggggaagcctggaaaatcacttgtttaggaggtccctacctcttccatggtccattaagatcaaaattgcactaggagctgcaaagggtcttgcttttcttcacgaggaagctgaacgaccagtaatatatagggatttcaaaacttccaatatactattggatgcagaatacaatgctaagctctcagactttggacttgcaaaagatggtccagagggtgata

SEQ ID NO: 88766 - DNA, 272 bp, Glycine max
  Clone ID: 700907353H1
tttgactctctctctctcttctttaaacacccctttcttgtccgctccatcgcctcttcaccacactttctctctcactcacagcacggtggtgacgaccatggttagagacgatctatgcatcaccgttcccagcttcttccgctgccctatctccctcgacgtcatgaaatcccctgtcagcctctgcaccggcgttacctacgaccgttccagcatccaacgctggctcgacaacggcaacaacacctgtcccgccaccatgcaggttc

SEQ ID NO: 88767 - DNA, 269 bp, Glycine max
  Clone ID: 700907355H1
caatactcctcgcacaacacaaccaaaatggccgcgaagaagaagtatggcggcggaaacggcaacaacaaggagaacgaagacagcaccatcaccgtcgtcttgacggtcgaaatgcactgcgacggttgcgcttccaaaatcatcaaacacctccgctgtctccaaggtgtggaaacggtgaaggctgatagcgacgccgggaaggtgaccgtgaccggaacagtggaccccacgaaagtgagggataacctggcggagaagataag

SEQ ID NO: 88768 - DNA, 268 bp, Glycine max
  Clone ID: 700907356H1
cggctcgaggtcaatctaaacagctgttattcaatgaagaatctgtataaattgactgcacggttgtgttgttctctcctctttattggaaaccaataggagatagagttagcattattaagctactgtgagacttatttccaaggttcattcgtgtggttctctacctaatttattctgatctaactttggcctaggaggcccaccattgggttttggtgggctttcactgaaccaataaaaaacccatctttaaaaggtgctttgt

SEQ ID NO: 88769 - DNA, 147 bp, Glycine max
  unsure (1)..(147): unsure at all n locations
  Clone ID: 700907358H1
gcggaatgtcagtgacgaaccttgctccatggttaacaacagtgggcgcaggcaccacttgatcgtgaattcccctcacaggntgattctagggcagacggtcggagactgctaccggcgatgtctgcactctacgncancggagca

SEQ ID NO: 88770 - DNA, 268 bp, Glycine max
  Clone ID: 700907359H1
ctttgctctctgtgaggcttcaatttccaattagggtttcgcttagagtaaccaattaccatgggagtcttcacctttgtcgttcgcaaatccggcgccgaatggagcgccaagcaacattccggcgacatcgaggcctccgccgactccacctacgatctccaaaggaagctcgtgcaagccgctctcgccgttgattcctccggtggagtccagtcctccttctctcccgtgtctcctacctccgctgtgttccaggtgatagtgg

SEQ ID NO: 88771 - DNA, 259 bp, Glycine max
  Clone ID: 700907361H1
ggaaagtttgatgaaagcaatgataacctctctccaactacgcttaatggctcccagaatacaatagatacctgatcagaccagggatattgtcaacaaaacggctgagacgcaacctgatttagtaagctagggaatacctcttccccttgctatgcatgcaaacatgtctgttcctgtcagaactgatggcgtacttgcacatcctcttcagggaatgtttctaatgcacaatcaactgaatgcccaacaactagtg

SEQ ID NO: 88772 - DNA, 166 bp, Glycine max
  Clone ID: 700907362H1
aagaaaaaaaaaaacccttagccaacacaaccatcatggtcacctctgctattcatcaatcagcattcactggtcaaactgctctgaagcagctcaatgagttcgtccgcaagaccggtggcgccggcaaaggtcgcactaacatgcgccgcaccgtcaagagtgc

SEQ ID NO: 88773 - DNA, 269 bp, Glycine max
  Clone ID: 700907364H1
gctgtgactcattgtaatgatccctatgttgatgactattatcacctagcttgtctttctaaaaaaactggtgctaagttgaaaaaatcattttgcccaacccaaataaaggaacttccttctcgagcccgctccaatacagactctcatggttttcttcaggtggatgctttagggagggtttcattcctggctattcgccggcctcatgctctgcttgaagttgatccgtcaaacagtggtatctctgagcgaaatatttctgagaa

SEQ ID NO: 88774 - DNA, 261 bp, Glycine max
  Clone ID: 700907367H1
tctcgagacgactcggctcgaggttcaagtgtaacagaatcaatctctctatcatgccagacacttcacttgatcaccacacattactttcctaatatattgatcaatgttctattcgaatgacaaaacttacgagcagttcctgagatgtgttaggtggtgttctctaattagagtgttatcttgtcaacttttctagtaaggtccacatttagagtcgacactagattctgaggtgactttaattatgaatagaaaaac

SEQ ID NO: 88775 - DNA, 268 bp, Glycine max
  Clone ID: 700907368H1
attcataatactggtcggaaaaaaaagtattatcctagtttcccctagttcaaatacaccccatgtcatgaaaattcccaccctcttcaataaggcatatacatcatgaagaggtgtgctattagcaatttgcaaacatcttaatttgttgaagcttcccattcctagctagggtcagtctcaattgttgaatcgtcatggaacgcaaggggaaaaagcctgttaagatgtccgtgcctcaatttggagggtgggaacacaagcccgc

SEQ ID NO: 88776 - DNA, 268 bp, Glycine max
  Clone ID: 700907371H1
cgccgagaaagagagagagacccaggtttacttggccaagcttgccgagcaggccgagagatacgaagaaatggttgagtgtatgaagaaagtagcaaaacttgatcttgatctaactgtggaagaaaggaacctcctctcagtgggatacaaaaatgtgattggtgcacgaagggcctcttggcgcatcatgtcctcaattgagcagaaggaagagtctaagggaaatgagcacaatgttaaactgatcaagagttactgccaaaaa

SEQ ID NO: 88777 - DNA, 268 bp, Glycine max
  Clone ID: 700907372H1
ctcttcctcttccctcaaatcataacacattttctctctttccattctctgttccgttccttctcgtgcgatttgcatattccgaaattgagaactccacccgcgcgaaaattgaaggcagagaagggcaaaagatttgatctttcaaacgaggagtttctggggtgtcacaggatgaggctaaacggtgaaatctcaagcggagaagaagaagaagaggcgaaacatacgggaacgacgacgttttcgtcgcagaaagtggtcattg

SEQ ID NO: 88778 - DNA, 267 bp, Glycine max
  Clone ID: 700907373H1
tgatgatcagtttttggatttaagagcttctgagggatccaataaagatggtatgcaccgcattgaccctgttgctgggtttgatcatgatctttcatcgcattttgttagtggctcaccatgtcctccatctgcatttcctccaatgggagaggttcagcctaatgaaatcaaccataaatcaactaatccatttgattatccttttgattcagatgtagaacataataatacgtgtcaattgcaattccttgacgtcagctctct

SEQ ID NO: 88779 - DNA, 268 bp, Glycine max
  Clone ID: 700907374H1
attatacttcgcatgctccccttatagtttttggaaattgatatataccaaagccctgagatttttcccatctttctcgtgatagttcttctggctcacaagccaataaaggcatccacaaccttcaacttcaacaccacttgaacaaattcactgtctagcgaatagtgatccaccttcatttcccgtttccaataatctaaacctcactctaatcagttctcaggattcccatttgcatcacactcacaagttagtttaattctgt

SEQ ID NO: 88780 - DNA, 267 bp, Glycine max
  Clone ID: 700907375H1
cttttgagccttgagttcgataattttgctgaagtgcgcaaactctatgaaggtggagttacattgcctacaaactttcttagcaagatcactcctataccaataattaaggaactttttcgaactgatggcgaacagttcctcaagtatccaccacctaaagtgatgcaggtcgacaagtctgcatggatgactgatgaagaatttgcaagagaaacaattgctggtttgaatccaaatgtcatcaagattattgaggagttccca

SEQ ID NO: 88781 - DNA, 267 bp, Glycine max
  Clone ID: 700907376H1
ctatcactaaatctcattcttcatctgcagctatttggattgctgattattgttaactgatattggtgcttttctttgagaaagtgtgtacactttttggataagagaaaacaagagaggtgacattggaagctaactcagagagaggcaaagatgttgggaattttcaagcagaagttggttaatgcacccaaggagctgaacagtccagcttctttgaattcatgcattaagcctaagctaagtcatgaaatcctgaaggatttc

SEQ ID NO: 88782 - DNA, 263 bp, Glycine max
  Clone ID: 700907377H1
tgttcgcccttttttttttttttttttttttttttttttttttaaaccgggaagggttcccccccctttttgaaataccccccaaaaaaaaattattcccctttttaaaattttaatttgggggggggaaaaaaacgggccccttttttttccccagggaaaattggggggtctaaaaaaaaaaaaaaaaaaaaaaaaagggggccccccccatttgggcccccctcccccggggttttttttccggggggtgtccggggggc

SEQ ID NO: 88783 - DNA, 265 bp, Glycine max
  unsure (1)..(265): unsure at all n locations
  Clone ID: 700907380H1
tctgaatagaaatggcttcggagactgagacgttcgcttttcaggccgagatcaagcagctcctcagtctaataatcaacacgttctacagaatataggagatgtntcttcgtgagctgatcagaaatgcatctgaagctttggataagattcgatttgagagtcttagagagaagatcaagattgatgctagcagggggttgttcattcacattattcctgacaagacgaacaagacattgtctatcattgacagtggtattgg

SEQ ID NO: 88784 - DNA, 263 bp, Glycine max
  unsure (1)..(263): unsure at all n locations
  Clone ID: 700907381H1
cagaagagagagaaacccatttctagagagagaaactcgcagtcgcagacatgtcttccttcgatgccttcgccgacgacttgaacgtcaactcttcttccagtgganagaagaaagaggannanganaanttntctggntanagnggntaatgctccttcacgggaggattctgcgccgacggagatgtcgccgtcgatcataaagcgnnngcgtcgccggagatctacggcttcactgattcgaatcccgcttactctcag

SEQ ID NO: 88785 - DNA, 266 bp, Glycine max
  Clone ID: 700907382H1
gagaattaggcaataagctaaagatgtctgacgattgcaaaggtaagagctcatggcctgagcttgttggagtgcaagggacagtggcagaggctacaattgagagagagaatcctttggtgaatgctatcattgtgcctgaaggaaacagggtcatcactgattaccgctgtgatagggtttgggtttggatcaacaaagatggaattgtcaaggaagttccacacattggatagaaacttttccctctagctagggttcaaata

SEQ ID NO: 88786 - DNA, 268 bp, Glycine max
  Clone ID: 700907384H1
cgtcatcgaactacccacgttctgctccttcgcagatcatttcgcgtttagcttccacgaaagatggcagacaatgaggatggaggggataagacatctcgtgggaatgaatgggaggttgtatctctcacagcatcaacatatgcagctgctcctggtcctgatgaagttgagatgaaggatgatgggaaagaagatgtatatgggcaggatgaaggagaaacgtcacatgctttattcatgtctagacactttgtctttccaccca

SEQ ID NO: 88787 - DNA, 266 bp, Glycine max
  Clone ID: 700907385H1
gcttcacttcatgtgattcaggactcagttaccatggttggtgaagcagccgtcccagttataacccttataatgggagcaaacctttttaaaggtttgaagggagcaaatacttcgttttggacaattcttggaattatagtagttcgatatattttcctgccaattttgggtattctagttattaaaggagcaacacagttgggtttggtgcaaccagatcccttatatcagtttgtgcttctccttcaatatgcacttccacc

SEQ ID NO: 88788 - DNA, 267 bp, Glycine max
  Clone ID: 700907386H1
accaaaagcaatggctaatacaccttcgaattcttcaattctcctctccctttttctattggccatcggcctctccctcgctgagtcccaatctttcatcggagtaaactacggccaggtcgccgacaaccttccggcgccggaggacacggccagcctcctcaaatccaccaccatcggaaaagtccgtctctacggcgccgatcccgccatcatcaaggccctcgccaactccggcatcggaatcgtcatcggcgcctccaacgg

SEQ ID NO: 88789 - DNA, 266 bp, Glycine max
  Clone ID: 700907387H1
aatatttttgttacaaatactgaaatactttgatattttgttcaagataaaatattttattattttttagattttcatatgctgtacctttttttatggatcataatatggtaatgtttactttaggtaaaataatggttggatcatctttattctgcattgttatgttgttttctatccatttgaccctattgattcattgcttactttaggaagatctgcccgtcctgctcctcgtgcagcacctcgtcctgctccaggtatgc

SEQ ID NO: 88790 - DNA, 264 bp, Glycine max
  Clone ID: 700907388H1
cacagattaatgaaaaatcagagaacgattttattgggaatattcctggttcagaagcacaggctgctgcaacttcaacaaattcagagccgaataaaaggccaaccccaagtcccttggataattgtcaacgtgaaacacattcacatgagttggtggatgggcaatcaacgagtcaatcatattttacagaccaacaaaggccacttggaaaaactgaaagtgccattggaattcctcagcatgagcagaatcccgcgccag

SEQ ID NO: 88791 - DNA, 261 bp, Glycine max
  unsure (1)..(261): unsure at all n locations
  Clone ID: 700907390H1
agattccaaatctcttcctctttagtctttataccgaaatggaatgcgttgaatcacgattcattaccttctcgactgttgctaggttatgttaactgttaccttttattcatatattacttcacactgcgcgttacttgatcaccaatcgtgcctatattagaactccggggtcaattcggatatgtcttctgatagtgcaaaggaaaatgcatcagtagttgattcgtangtcactgaagggaggaatgacattggaaa

SEQ ID NO: 88792 - DNA, 267 bp, Glycine max
  Clone ID: 700907391H1
gttgaaaatactttcattgtaattatgctatcaaagagtaagagcccatccggtgaaggatctactacttcaactgctccatcaaccaaggccccacagacaagtacagttcctgcttcaacccctccagcgtcagtagttcctcaagcttctgctcctgctcctgctcctgctcctgctgcaactggggcactgcctgcatcagttactgcacctatatcttcaccttctcctgctccagccccaactcctgctcctatatcttca

SEQ ID NO: 88793 - DNA, 266 bp, Glycine max
  Clone ID: 700907392H1
gaagagcatttggctgtcaagcacttctcagttgagggacagttggactttaaggctatcctctttgttcctaagagggcaccttttgacctctttgacacaaggaagaagcctaacaatattaagctttatgtccgccgtgtctttatcatggacaactgtgaggagttgattcctgagtatttgggctttgtcaagggtattgtggattccgaagatctaccactcaacatttcaagcgaaatgttgcaacagaacaagatctt

SEQ ID NO: 88794 - DNA, 265 bp, Glycine max
  Clone ID: 700907393H1
aagaacaacaaagtaacgtgaaagagagagagatggaggcgattgttccagtggtggatttccagaggctttcagaggaagaggagcgcaagaagctgagaaaaacatgtgagaaaccagggtgtttcagaatcatcaaccactcaattccactaacactcatggctgacatgaagtcagtggttaaatacttgcatgaccttcccacggaaatcaaaatgcgcaacataacctccgtccctgagagtggctatagggcggcaat

SEQ ID NO: 88795 - DNA, 265 bp, Glycine max
  Clone ID: 700907394H1
gagaatccgaggcgaagagaagagaaaaattaagatggaggggaaggagcaggatgtgtcgctgggagcgaacaagttcccggagagacagccgattgggacggcggcgcagagccaagacgacggcaaggactaccaggagccggcgccggcgccactggttgacccgacggagtttacgtcatggtccttttacagagcagggatagcagagtttgtggccacttttctgtttctatacatcactgtcttaaccgtcatggga

SEQ ID NO: 88796 - DNA, 261 bp, Glycine max
  Clone ID: 700907402H1
caaaaacctctatggctattcttgcttctcctcactctcctctcaagctcccaagccaacaaattcaacgttggtggaagcaaagggtgggttccaaacccttccgagagttacaacaattgggctggaagaaaccgattccaaatcaatgacacaatagttttcaagtacaataagggttcggattcggtgttggaagtgaagaaggaagattacgacaagtgcaacaagaccaacccaatcaaaaagtttgaaaacggt

SEQ ID NO: 88797 - DNA, 257 bp, Glycine max
  Clone ID: 700907403H1
atcagaaacaaagaaccctagtaatgccgccgatggggaggaagcgaaaggtagcacccaaatcttctctatcgaccgagccacctctcaagcagcaacaaccaaaacccgaaaatccccctcaagaatacgaagaagaagacgaaaacgacgtcgtcaaacaacagcagcagcaacaggaagacgaagacgacatcccgatatcgaaacttctggaaccgttgggcaaggaccagcttctgaaccttctttgcgac

SEQ ID NO: 88798 - DNA, 252 bp, Glycine max
  Clone ID: 700907404H1
ttcttattcatttctcttataagtgcttctaaaaaatttacccaaacaagcccctagtatagttgagttctgtgcaaataattgagtgaatttgaatattaaacacaacaaagagagagaaataagataaattaatatattttagagtctgaattgagatatgcttattaagggttgcatcaaaattttctcttgtctaccatttctgtgtctttctagacgataacagacagcaaatctatttcactattt

SEQ ID NO: 88799 - DNA, 255 bp, Glycine max
  Clone ID: 700907406H1
gttcttgggaaacagaaccgggcaaccttatattttgcaaacaaatgtgttcaccggtggcaagggtgacagagaacaaagaatctacctctggtttgaccctacaagagaatatcacagatactcagtgctatggaacatgtaccagattgttttctatgtggatgactacccaataagggtgttcaagaacagcaatgacttgggagtgaagttcccatttaaccaaccaatgcagatatacaacagtttgtg

SEQ ID NO: 88800 - DNA, 260 bp, Glycine max
  Clone ID: 700907412H1
taaaggatctctttcagaaaataatgtaagaggtcgaataatgcttgaaaagaatggaaaaaccacaaattcctttcctggggatgtgaccacagaaaggattgctcgctcttcaggaagcatactggagtatggcgtcagcactttctgaagcagatggaatcgattacactgatcctgaagagcttgagttgttggtcagaactcttatagatctggatgccatggatggtaaacaaagtgtttctttattggcagag

SEQ ID NO: 88801 - DNA, 261 bp, Glycine max
  Clone ID: 700907413H1
agaagctgcccacacaaaagaggcatcgatgatgtttctctgagtcccaggattcacgcattaaccaactgttgctcttcctcaaaactcaatacgctacacactcttcaactcttattcccttcctcgattccacttctccggattagggttttctttctttcagtagaaaaagaaaagggtggtttgggagaaatggttgagcaatcggtgctggcactggaaaagcagcaagggtcaaatccagtgttatcagaagga

SEQ ID NO: 88802 - DNA, 259 bp, Glycine max
  Clone ID: 700907414H1
caaagagccattgaactttgactataatattcagagttcagattactcactctaatcttctaagttttcattttggggtttaagtttctgaaggaaaaaaaaatgataaagtttgttctatttttgttctgctttgcctctgcactgaccctttcagtatcggagtccaaatcagcttcagtgcaacctcatgctgctgaatctttctctgttggatatattcagatgaagactgcagcgaactgttcttacctggtag

SEQ ID NO: 88803 - DNA, 164 bp, Glycine max
  Clone ID: 700907415H1
agtggtcatctggacggtgcaccgacacatgctgcaggagctgtacatggtgcatgctgcgtacaatgctagaacgcacgttcgctgacgcacatctccttgaaggttcagattcctacacgtctgcgtaatagcatctcctatcgcatctagagtatgcccat

SEQ ID NO: 88804 - DNA, 261 bp, Glycine max
  unsure (1)..(261): unsure at all n locations
  Clone ID: 700907417H1
ttggatttgtttctaaatctggtgggatgtccaatgaactatacaacactattgcccgcgtaactgatgggatttatgaaggcattgctattggaggagatgttttccctggttccacactttatgcgaaccccttacggtttaacaacatgccacaggttaaaatgatggtagtacttggggaacttggtgggcgtgatgagtattccttagtggaggctgnanaacacggagaagtatccaaaccggttgttgcctggg

SEQ ID NO: 88805 - DNA, 261 bp, Glycine max
  Clone ID: 700907418H1
gttttcatttcgttcttttttttccttccaaactcactcatctcagacttcctcttcctctctcactcagattcagcaattttctattttcttctctcatggcttcagattccaaaaaggatttccctgctgatgacaaagctggaacagcagagaataaagcatccaaagatgaaacgtcatctaaagattctccagcagcacaaagagctactacagctacttctggacctgcaactggttttccaggcaacccttttg

SEQ ID NO: 88806 - DNA, 260 bp, Glycine max
  Clone ID: 700907419H1
gttgtgttgtgttgaagtagcaagctagcaaagatgtttggcatcttaggaggcaataaggggcacaagatcaagggtactgtggtgttgatgagcaagaatgtgttggacttcaacgaaatagtgtccactactcagggtggtttggttggtgctgccaccggcatcttcggtgctgccaccggtattgttggtggagttgtcgatggtgctactgccatcttcagtcgcaacattgccatccagttgatcagtgccac

SEQ ID NO: 88807 - DNA, 260 bp, Glycine max
  Clone ID: 700907420H1
gtcaaatgcttagattcttctttatctccaccagagaaagttcaacttgctctagattgcttgcctaaatcttcagaaaaaacactatctggaacaaattcttcattctgtcgctggacaataatggattatgccaaagcttaccgctctggggacataacaccaagcttggttgcagaacgatttattgctgctattgatgaatccacaaaacccccactccaaatggggttctttattcactatagtgctgatgatat

SEQ ID NO: 88808 - DNA, 251 bp, Glycine max
  Clone ID: 700907421H1
ctctatttgtaccagattctggctgagcagtcctaagtaagtcattgtagaagtcatggttctagagtccattttgtcgtcttcgaagtcaccatctttcaggaggcagtttgcaaagcatgaactgggcagttggtcgacactcttgaagaggcaccgcttcctcttatttgctcttgctctactaactgtcctctgtaccatttatctatattttgcagttacatttgcagccaatgactcctgctctg

SEQ ID NO: 88809 - DNA, 112 bp, Glycine max
  Clone ID: 700907422H1
tgtgtcgcggcgctatctctacatgattagtctatttagattatgggtgaaggttgcggagtagacagaggctgcaattcgcgattatggtatgagtggcagacatgcagaa

SEQ ID NO: 88810 - DNA, 257 bp, Glycine max
  Clone ID: 700907423H1
ttgcattcagttagactttgatagtttgattagctctaataaggttaaggaccagagagagtaagagaaataatgagaaaaacacaagatgggttattggaagtctaaggttcttcccaagatcaagaaggttttcgagaagaatagcaccaagaaagctgctgctgctgaggccaccaagtcctttgatgagtcaaaggaggaatacaacaaagccttagtagaaaagaagactgaacttcaaaccaaagttgttg

SEQ ID NO: 88811 - DNA, 257 bp, Glycine max
  Clone ID: 700907426H1
attgttttcttcatatcttccttgtcactgcccgtgtgtcgccgccatggccaccgtcaccacccaagcctccgccgcaattttccggccatgtacctcgaaatcgaggtttttgaccggctcttccggtaaacttaaccgggaagtgactatgcggccaatggggtgccctccttctgcctctttcaaggttgaagccaagaacggagagtggttacctggcttggcctccccaacttacctcaatggcactcttc

SEQ ID NO: 88812 - DNA, 257 bp, Glycine max
  Clone ID: 700907427H1
cgactttcctgcagcgttccttccaaattccaaacccaccataatatctagcttcttgtgaaggctgttagtttgattatacaagttggtatcgataatttgctgtgaagggttgccaaaggagtggttatggtaagcgtccccactctcaatctgaccatgataatgggccaaataaaaggaggaatcatggtgatgatagagagcagtttgtgattgattcggaggataccgtgtatcgttatgtgtgcccgggt

SEQ ID NO: 88813 - DNA, 262 bp, Glycine max
  Clone ID: 700907428H1
gtttttctttttttcatttgcattgcaaagcaaaaaccttgcaaattgcaatggcttccaacaaggttattgccaccatcttggttctttctctccttgcctactcaacatcattcaccaatgcatgtggcacatgccacccaaaacctactccttctccccctcctccatcagggaagtgccccaaggacacattgaagctaggggtgtgtgctgatgttctaggacttgttaatgttgttgttggttcccctgtctctag

SEQ ID NO: 88814 - DNA, 261 bp, Glycine max
  Clone ID: 700907431H1
gaagaaagttgcttgaggtcactatcggcctacttcgacaagaggtttctagtgtagcagccgggccattgtttcctaggttgagagatgattgtgacaactttcagaaagatttggtgctcttgaaggaaagaagagcaatcttttgtgaaatgaacaaccttggtagtggtcagattgacaatgaggaagtttctcaaggggcagttggtccaatgcaattagagctggatgacataagatagagttgttactggtgga

SEQ ID NO: 88815 - DNA, 267 bp, Glycine max
  Clone ID: 700907432H1
ctacattagttcttgttattcattattcattctcagcttcttttcttctggggggcaaaaggggtcacttttcagatccgagattgagctcctttacccatcatcatcatggagctcctcgggtacctgaatcagggtcacccttctagaggaacaacacttgttattactctttcattggtgctttcgacacttgtgtccttctccactttcacacatgccttctctcccttctgcgtttccggaactgaatcctataaaacctag

SEQ ID NO: 88816 - DNA, 257 bp, Glycine max
  Clone ID: 700907433H1
cccttttctgtttccaatcgtttctcctcacattctcgccgaagctcactccaaatgaacggagaaggcctcgccgccgacgactcctcgccggatcacgtcaccaaagactggtactccgtgccggagctccggttgcgcgatcatcgcttcaaggttcctctcgatcactctctgggaccccattcttctcccaagatcactgttttcgctcgtgaagtcgttgcaggtggacctgggtttgagtgcgggcggcc

SEQ ID NO: 88817 - DNA, 259 bp, Glycine max
  Clone ID: 700907434H1
ggtggcttgatggtgatgagttcattgtgtcttccatgcttgaaattgctaatatcgcccaagaaggaaagactgcattagaagaaaaggactactccaaatttgcagctctcatgaatcgaaattttgacctgcgaaggttaatgtttggagatgatgccctcggtgatttgaacctaaaaatggtagaggttgccagaaaggttggagctgcgtcaaaatttaccggtagcggaggagctgttgttgcattttgtcc

SEQ ID NO: 88818 - DNA, 257 bp, Glycine max
  Clone ID: 700907435H1
cttcttctgcgtcatcttagggttttggtttgtgctcctctcactgattttctggagatggcttctttcgggccaaatggaactgaaaatgaggattcgttgcctcccccacctcccgttgtaccatcagatgttgtacctgttaaagctgagccggagaagaaaaaggcttcaaggtttccaatagccaggcgtggccttgcttcaaaagggacgaagctgcaacttctcaccaatcagtacagagtgaacgttgc

SEQ ID NO: 88819 - DNA, 173 bp, Glycine max
  Clone ID: 700907438H1
cttgattcttctcatactgaagacttacttccagaagtgattatcaaatgtctcaatgaatgggatattgactgcaagctttttgccttgacacttgatgattgttccatcaatgatgacatcactgcttagaagtcaagtgagcgagttctctggacaaaagcgcctgtttt

SEQ ID NO: 88820 - DNA, 255 bp, Glycine max
  Clone ID: 700907439H1
agtgtactatgtgatgaaaattagtttatattttttcgctggatatcagtacagccttccatagtagaatcttattgtcaccaaagtgctattggtctggtgaaaatcagtaaattttcggtgcacagtacctattaaagtattaaggtatgattacgtggtggagcagcagcgacagttttctacaatttgaggctaaaacatccgacgcttgacgtgccagagatcgactacgacttggcacttcttttccaa

SEQ ID NO: 88821 - DNA, 159 bp, Glycine max
  Clone ID: 700907440H1
tgagcccgatgtcatccatttcatcgtccatgtccatggatatgaagctaaacctgtttttacttcttgtcctttttgcttctacaatttcctcttctcttgccaagggctccttgcaacaaacccttcttccttcagaattcaatgactgtagtaatg

SEQ ID NO: 88822 - DNA, 159 bp, Glycine max
  Clone ID: 700907441H1
ggaaatatcaatatgctgcttgacaatgtaacgagcactagcactagcactacccctagcaaatatcctctattgagaagaaggcgtaggttgattgttatagcatctgatttgtatgacaataatggagctccggagaagaaaatgattgagatggtg

SEQ ID NO: 88823 - DNA, 255 bp, Glycine max
  Clone ID: 700907442H1
cgcgtcgctgctccgtaccagtttcactgcataaatttgagagaaaactctgcaaacatgttggtttatcaggacctccttacaggtgatgagcttctctcggactccttccgttacaatgaaattgagaatggaatgctgtgggaagttgaggggaagtgggttgttaagggagcagttgatgttgacattggtgcaaacccttctgctgagggtggagaagatgagggagtcgatgacgcagctgttaaggtt

SEQ ID NO: 88824 - DNA, 158 bp, Glycine max
  Clone ID: 700907443H1
aaaggaggatgaagttctatatgaggccacatttgacttaccagaagctttcgggaatgtgggtgctgttttagtacagacatgaggaccacaatgaggtgtttctaaagagcatagtccttgatggcttcccaaatggtcctctgcactttacctgc

SEQ ID NO: 88825 - DNA, 262 bp, Glycine max
  Clone ID: 700907447H1
gtggagtagggtttttttgcgtttgagagaagcatgagcaggagtttgggaattccggtgaagctgctccacgaggcttcggggcacgtggtgacggtggagctcaagagcggagaactctacagaggcagcatgatcgagtgcgaggacaactggaactgccaactcgagagcatcacctacactgccaaggcatggcaaaacatcgcaacttgagcatgtgtctattcgaggaagcacagtcaggtttatggtcatccca

SEQ ID NO: 88826 - DNA, 257 bp, Glycine max
  Clone ID: 700907449H1
gcgttatagattatagattatttacattgacacgatttgtcagtatgagtaactttttatggattctttgccaatccatgtggattaaagatatataacattcttttcattgacctaaatgtagctaagtgtctcttcaaggattagcaacgcaaaaatcattctaattatagattgtgacatgtactcaaaccattcacaatcagtgagagatgcccttctgttttttcatggatgaagagaaaggccaagaaatt

SEQ ID NO: 88827 - DNA, 257 bp, Glycine max
  Clone ID: 700907450H1
caactaacgatttcttttgtgctgagtttgacggtgaatcagaggcaggcgtacgtatacgtgtagtagtcggattgagagcatggacgctcccctgctgctggtgaacggcgagggggcggcgctggtggcggagaatggtgactacgtggcggtgagggagctgaaggaggtgaagaaggtgttttggattgagaccaagagagtgtgggagattgcgatgcccatcgttttcaacatatggtgtcagttcggtg

SEQ ID NO: 88828 - DNA, 255 bp, Glycine max
  Clone ID: 700907451H1
ggcttgcagtgacattaggtgcaatgaaaatttcctatattgtgggaaccagcacatggaaggttatagtgcttggaataaaacaagtgaagatattcagtcaaggtgctctgcagatggtgatcctgcgcattttgattatggaatttttgggcaagtcttgtcttctggcatcatttcatctaagaagttcatctccaaatactgttactgtttatggtgggggctccagaatttgagtacacttggccaggg

SEQ ID NO: 88829 - DNA, 101 bp, Glycine max
  Clone ID: 700907452H1
cacaaggctggcatcaagctcgtcctagagttttgcaaatggaagcagcttcctctatggctctctcttccccgtcctcggctggctacggcgtgaagcta

SEQ ID NO: 88830 - DNA, 254 bp, Glycine max
  Clone ID: 700907454H1
ctctcacacacactttctctctctctctctctcacccagatcttgtagcaatggcgagcgctcccactccacgcgaagagttcgtgtacatggcgaactggcggagcaggccgagcgctacgaggagatggtggagttcatggagaaggtctccgcctccgccgagagcgaggagctgaccgtggaggagcgtaacctcctctccgtcgcctacaagaacgtgatcggcgctcgccgcgcctcctggcgcatca

SEQ ID NO: 88831 - DNA, 257 bp, Glycine max
  Clone ID: 700907458H1
cgcagagcgatggccctcacagctttgcggtcacgcgtgccgtgccggggtcatcctgtggagatgttcttcgagtgatgcagcaccagcccgagctcatgttcgagacactcaagctccgcgcgcaggagtatgtcagccacgacaacgcagcagcgcttctggctgctggccttgatcgcacctttgacagaatgccttatctgctgtctctgtcttcctttgtggctgacgatgttgctcctgctgttcctgct

SEQ ID NO: 88832 - DNA, 261 bp, Glycine max
  Clone ID: 700907461H1
attctctactctctcacttctttctatcacatttcacttgcaagatggcagcgtcatcagcatgccttgtagggaatggtttatctacacggggtaatagaataactctcaagaaggacttcaatggaagatatctctactcaccttggagactttcatcattgaacaataaggcatcagaagcattttccataaagtcttccttggagcaaaggcaacaacaagagaggagaagggggtttctaaaactgttgcttggaa

SEQ ID NO: 88833 - DNA, 258 bp, Glycine max
  Clone ID: 700907463H1
gcttgtcatgcaccaaatcaaattgtattaccaactgcggaggagtttcaaccattgaactattatgacccaagaaacgagctattggatgataaattattctcccctgtacttgcacatattcaaccagaatttcattatcaagcaaacatcgaatcagatgattggtatgggcttcaatatggtacaaatgagacaaacatgtcagactttttgaattcagttgtgaattgggatcaagtatcctttgaggatctc

SEQ ID NO: 88834 - DNA, 263 bp, Glycine max
  Clone ID: 700907464H1
gtttgagggatgaatttgatgttgaagtaccaatttattttcgtggtggggaagatggctctgttactgcgtatgcacgaatttctcgtcaggtttacaacaaggttgaggactattataagttcaggaatgcggttaatcaacttgtgcaagatgggtttacttgtgctcttctttcggcttgaaattggggtagcctatgctctgctcttagttttaattaactcctcaataacatattcgtccattttatatgtgggata

SEQ ID NO: 88835 - DNA, 254 bp, Glycine max
  Clone ID: 700907466H1
gggttttccaattcacagagcaacacaacgaaccaacaatggcgcagctcagccgcagtcgcagccgcagcacgggcaagcagcgctggagcaggtgcagtgcttcggtcgcaagaagaccgccgtggccgtgacctactgcaagcgcgggcgcggtctcatcaagatcaacggctgccccattgagctcgtggagccggagatcctccgcttcaaggccttcgagcctatcctcctgttgggtaagagccgct

SEQ ID NO: 88836 - DNA, 257 bp, Glycine max
  Clone ID: 700907467H1
tgggaatctaaataggaagtcatgtgcttcagctccaaggcattcactattcagaggtactaagcgcatcggtcggtccaaattatgaagttgttcccatatctaacttgaggagatactttatgataaacctgtttgaaatatcagcaatttccctagacaatacaggaagatatgatagattttggtgcaataattggctgttctgtctgcagtggacatgtaatggttgcaatggttcaacaattaattccttg

SEQ ID NO: 88837 - DNA, 256 bp, Glycine max
  Clone ID: 700907468H1
gtgattccggaacagctctgtttgctcttcacttttaccttcatgaacgcgtacagtcattgtcataggtctccttgtcgtacgacgatgctacaaaatcattttgttttccaatatctgtttttttcttgcattatttattttggatcttaggagtagtaagtaaacacagcacctcaggttttttattttggcagatatacatgttttttgttacacaaatattttgtatctttgcttgaaggataagcataat

SEQ ID NO: 88838 - DNA, 158 bp, Glycine max
  Clone ID: 700907469H1
gaaggattgagaaaaagaaagtggtgtccaagcaatggcaattatctctggtatcccttaatttatatgaatgttgtcacagaggcctttcttttccttatgatgttgctcttgttcctaccaaagcagcaacattaaaattaaaacatggcatcttc

SEQ ID NO: 88839 - DNA, 251 bp, Glycine max
  Clone ID: 700907470H1
tatctaaccactactataatgctttgctttgttttgctacccctcttcctctcctgtcatagcctctccatcaaatgatcaatcacttaacagctgcctcccactgctcgtacatcttgtatctctcctttgtggggattcactgtgagtagatgctactaacacatctttacggagcatcattcatcattgttctgcattacctctcgtgttcaatatggatcagtgctttaactaaacatctgtgaagg

SEQ ID NO: 88840 - DNA, 117 bp, Glycine max
  unsure (1)..(117): unsure at all n locations
  Clone ID: 700907471H1
atcatcatagacacaatgggggatctggggacacaaaatggaaatgttgcaaaactccttagatatcatatcattctcacctacgggttttagctaaccctncagccatcccagcgt

SEQ ID NO: 88841 - DNA, 249 bp, Glycine max
  Clone ID: 700907472H1
cttctggtcacattcttcctcgccaccacggcttttgtaacatcgtgagtggtgcctcatttggcttctcctgctagagctaatttatcaaatagcatttttttttttctggagtgaggatacaatttttttagaaatatatcagtttattgttttcttctgcaattttagggttatttaaacccctaaaatcactatgctaaattcccgagtagtagctagagtcggagcttcgatcgttaaacacct

SEQ ID NO: 88842 - DNA, 254 bp, Glycine max
  Clone ID: 700907474H1
cgagcctgcaaccgagaagagagaggattttgggaagttgcagtacggatgcgagcactataagagacgatgcaaaattcgagcaccatgctgcaatcagatttttccatgtcgtcactgccacaacgacgccgcgaactcatctagcaaccccgcagatcgtcatgaacttgttagacgcgatgttcagcaagttatatgctctgtctgtgatactgaacaggaggttgccaaggtgtgttctagctgtggcg

SEQ ID NO: 88843 - DNA, 253 bp, Glycine max
  Clone ID: 700907476H1
aagaaactgggatttgcatcttgtaagcggatctcaggtgccacagaaggagttaatgtgctgatggagaagaaaagtcttgatgggaactgggaatatggtgtgtcttgtattgaatacacagagtttgacaagtttggaattactaccggacctcttgctccaaaaggtttgcaggcagagttccctgccaatacgaacatcttatacattgatttgccttctgcggagtagttgggtcaagtaagagtga

SEQ ID NO: 88844 - DNA, 259 bp, Glycine max
  Clone ID: 700907477H1
cataagaatttgtcattacaattcttgaacaagaacaattccgtccacgggaatattcatgattcaagctatgaggcaggacttgacattggcggttcaatcttcaggtttgggtaagcaggaatcggcaatcgaacctgccaaggagtgccttaagatgacaaggaggatgggtccttcaccaatcaagaatgctgctagattatcaattacattatcgaagtttgtggcttataggaccgatatagaatggtacaaa

SEQ ID NO: 88845 - DNA, 256 bp, Glycine max
  Clone ID: 700907479H1
gatctttgatgggcacaatggtatatctgctgctatttttgcgaaggaaagcatactaagtaatgttttgagtgcaataccacaagatatcagtagggatgagtggcttcaagctctgcctcgtgctctagttgttggttttgtaaaaactgacatagagtttcagaaaaaaggggaaacttcaggaacaacagctacatttgttctggttgatggatggactgttactgttgcatctgttggggattcccgttgc

SEQ ID NO: 88846 - DNA, 261 bp, Glycine max
  Clone ID: 700907480H1
gaagaactaaaatcaaaagatataaagaagctcccgagcgtcgaattcttgagagaagtccttaactccgtcatgtttcttcttcaaaaatctatcctgaaactactcattatacactggccgttcccgataccaaaaataccaaaaaacttctggaaaccaaagtcccagaaaccaaagcaccctcccccaccgccagactaccgtgtacaactaaagtccgatcccccagcgccaaacgcaccaccgaagcaaatcaat

SEQ ID NO: 88847 - DNA, 254 bp, Glycine max
  Clone ID: 700907482H1
tattctttcgcaccttgcagaatcaattttctctctcaatcgtctttactggctcgtaccaagcaaaccgctcgcaaatccaccggtgggaaggctcctaggaagcaactcgccaccaaggctgcaagaaaatctgcacctaccaccggtggagtcaagaagcctcatcgctatcgtcctggaactgttgctcttcgtgagatccgaaaataccaaaagagcacagagcttctgatccgcaagctcccctttca

SEQ ID NO: 88848 - DNA, 256 bp, Glycine max
  Clone ID: 700907483H1
cccaactcaatttttctctcaaccggcccaatttagcataagcccagcatggccaccgcaacagcagcagccacctcgtccttcatggggacgcgcctcctggaggcccactccggggcggggcgggtgcaggcccggttcgggtttggcaagaagaaagccgccgccccgaagaaagtttccagggggtcgggctctagctccgataggcccctgtggtatccgggcgccaaggcgccgatgtacctggatggga

SEQ ID NO: 88849 - DNA, 257 bp, Glycine max
  Clone ID: 700907484H1
cgtcttcctcctcagcttcgcaatcgcagttcgcctattcaaacccctcctcctcctcctcctacttccccgttccctttcaccttcagcaacccgcaaccactcactacgctgcgccctacgtcgccgccccctccgtgcaaatccccgctcctccagtcgtcggccccgttgcgcccgcccctgtacccggcgtatactccgccgtgccgcaatatcaggcacagcagttatttgagagggatgcgcagataata

SEQ ID NO: 88850 - DNA, 266 bp, Glycine max
  Clone ID: 700906741H1
gttaagactagagcatcactgaactaacaaagcaaccctatgtcgaaggtggtttgtgtcaccggagccagcggcgccatcggatcatgggtggtcctactcctcctccagcgtggttacaccgtccatgccaccgtccaattcttctaggatgaaaatgagacgaaacatttggaggaaatggaaggagcaaagagtcatctccattttttagaaatggatcttcttgacatcgactccattgccgctgccataaagggttgttc

SEQ ID NO: 88851 - DNA, 266 bp, Glycine max
  Clone ID: 700906742H1
atcctcttcaccctccctccctccctcgatcttcgtgtcaacacttcaaaaagtcttcccttatagaacaaagtgtttttccaaatcccttcccttcttccaaatccctttactgtcacgtgaaatctaacaccgagcgtgtagatagtctatgaaatccaattaaatgttcttctgagaacaaagaacataagataacaaacagaaagcgcttataaatggctttccacgaccatctaccgtccgaaatcacgttccagccgttt

SEQ ID NO: 88852 - DNA, 257 bp, Glycine max
  Clone ID: 700906743H1
taattccagttaaatcccttatcacattcacaaatatacataaaggggggattcacgaagatttaattactaaatgaataacttacccatgaatcatttccccggggtatgtttcaagttcccttatataattaatgcaaattggattttgattataggatatgtttccaaaaagattcaacgtactttttatgggtatacgataaggaaaaaaaaaaaaaaggggtgtccgcggactagagaccccttcacccggg

SEQ ID NO: 88853 - DNA, 260 bp, Glycine max
  Clone ID: 700906745H1
gttggtactaaagagtaaatcccacaggatgcatatcgtctcattccgtgacagattctgtgtacgatactgtcgtagtgctaaaaagcataatatatgaatttttttttctccttttctggagaatatatataggagcacaatacaatctgagtcagaatcagataagtgttggtttgtgtttttgttgagaagagagaatggctgtggcgtcgtcattatcccttatcacgttgaaggtgaaaaccttgcattatcgg

SEQ ID NO: 88854 - DNA, 86 bp, Glycine max
  Clone ID: 700906746H1
cttttgcctgtgaggaaggagaaactctaggggaatgaaaggtcttcaaaagaggactttaacactctacttgccacactacatac

SEQ ID NO: 88855 - DNA, 252 bp, Glycine max
  Clone ID: 700906747H1
ggaaaaggtggcaaggaatttgcaacgttgtaaatcctcacccccctcctttcgactttttggtgtcgacatgatccgctagcactaattggaatattaggagttaacccttcgaggggggaaaaccaaaccaattcaaccaaatgcataccatgcctcctaaaggcaccctaactttaatattccttcaccatgatgtcctttctttcaacaacagagaacactcgttaatcacaccctctccacacaaca

SEQ ID NO: 88856 - DNA, 269 bp, Glycine max
  Clone ID: 700906749H1
gatggcaaagctatttttgaaacaggcaaagcaatacgcagatgcaagaccaagctatcctccacaactcttccatcttcattgcttccaagactccctctcactacctcgcttgggacgtcggctctgggagcggccaagctgccaaatctttagctgcaatatacaagaatgtgatagccacagatgctagtgacaatcaacttgattttgcagccaagctcccaaatgtgagataccaacacaccccttcaaccatgtcgacggcc

SEQ ID NO: 88857 - DNA, 261 bp, Glycine max
  Clone ID: 700906750H1
caatttttcatttgaaaataataaaaccctaaaagaggggttgcaagcaaaatgtgaagctcgaagatgtggatggttttcatgtgtctgacggtgagcttcttcgctcgcattgaatcgctatccgtgacggtgaacgacgtcgagtgcgtctacgagtacgtactttacgagggcgacaccgtttcggggaactttgttgtcgtcgaccatgacattttctggagctctgatcaccccggcattgatttcacggtgaca

SEQ ID NO: 88858 - DNA, 265 bp, Glycine max
  Clone ID: 700906752H1
caaattgcaggtacatatgcacaacttgggggataggaatggatattaaagatgatgtaaaaagggaggaggtgacaacacttgtgaaagaaatgataatcggagaaagggggaaggaaatgagacaaaagtgtctggagtggaaaaagaaagcaatagaagccactgatatgggaggatcatcatataatgatttccatcgattagtgaaggaggttcttcacaatgatgttgtttgagtctttcaatatattgggggtccgaa

SEQ ID NO: 88859 - DNA, 135 bp, Glycine max
  Clone ID: 700906753H1
gcgttcttcaatttattttctttctgcatctcatggatgtctccacacactctacatagaggactgtcggagtaacaccttctgatcctcgaaaatcacttccacaatggggtcgtcagatccacaccacacaac

SEQ ID NO: 88860 - DNA, 263 bp, Glycine max
  Clone ID: 700906756H1
ctcgagccgctcaaatttgctatgtaggattatgggaagtgtccaattactggagaaccacttactatggatgacattgtaccaatcaagacaggcaagatagtgaaacccagacctgttcaggcagctagcatccctggcatgcttggaatgttccaaaatgaatgggatggattgatgctatctaattttgcattggagcaacaattgcacacagcaagacaggcgctgagtcatgctctgtatcagcatgatgccgcttg

SEQ ID NO: 88861 - DNA, 260 bp, Glycine max
  Clone ID: 700906757H1
ctttaatcacgcactatcagtacaacaactcactcactaagctaaccaatttcatcaagcctgccatggcttcctcgtgtgcttcctctgacattgcagctgttgccatctccacaccaagttcccatctgaatggatcactcttgggaagcacaaaagcttcttttcttagtgggaggaaactgaaggtgaacagttttacagcaccagttggagcacgagccagcactacagtgcccccagttgctgagcctgatagg

SEQ ID NO: 88862 - DNA, 93 bp, Glycine max
  Clone ID: 700906759H1
cagacacgtacgtacataattaagcagtagtggactaggtagtacgtactctagtctccttatttgtccttaattattggcacacaattccac

SEQ ID NO: 88863 - DNA, 75 bp, Glycine max
  Clone ID: 700906760H1
cttcctctgaaacaagaaccggaatggagaattcgaccgaagaatcccatctccgatcggaaaactccgtcactt

SEQ ID NO: 88864 - DNA, 208 bp, Glycine max
  unsure (1)..(208): unsure at all n locations
  Clone ID: 700906761H1
gttgacgcgactttaatccgtgaggtcgnaangnaaaanaaaggggaaggggggnaatcaaacgaatcaaccatagtccattaccttcttcccgcgctgaaaaaccagtgacagtgagtgaggatctaagctccaatggaagacgaaatggcgatgggcacttctcccagttacttcgaccctcacaacctctcatattcacaacata

SEQ ID NO: 88865 - DNA, 258 bp, Glycine max
  Clone ID: 700906762H1
atggcttgtagactcaaagggtttgattgttggttcaagaaaggcttcacttcaacacttcaagcagccttgggctcatgagcatgagcctgtaggcagtctcttagaagctgttaaggtaatcaagcctacagttttgattgggtcatcaggagtgggaaaaacatttacaaaggaagtaattgaggctgtgacttctataaatgaaaaacctcttgtcctggctctctccaatccaacttcacagtgtgagtgtac

SEQ ID NO: 88866 - DNA, 257 bp, Glycine max
  Clone ID: 700906763H1
cgttcaccgtcgccattggcagtggcgtggctataatcccctgcggcaataccaccaccgcaattcctttcacccgtggtggtggtcaccgaacgagaagaaagctccatctccatgtggcgcgcgcgaagaagcccctgaacggcgacgacgtttccatttacactgagctcctcaaaaccgaagtttccgttttcgaaaataagcccctcggcgacaacgatgccgctttgaagttcgtagagaagatagaccgt

SEQ ID NO: 88867 - DNA, 259 bp, Glycine max
  Clone ID: 700906764H1
ctttttccttccacttttctctttggacttggttcttctgcttaccaggcagaaggagcagcaagtgtagatgggagaggaccaagcatatgggacacctacactagacagcatactgaaaagatttgggatcatagcaccggtgacctgggagctgatttttatcatcgatacaagggtgacataaaaatagcgaaagaaattgggctggactctttcagattctctatctcatggtcaagaatattcccaaagggca

SEQ ID NO: 88868 - DNA, 262 bp, Glycine max
  unsure (1)..(262): unsure at all n locations
  Clone ID: 700906765H1
cagccttttgcttgcatgtatgagtggctgcaacttttatttgctctgcctgcttttccgtgaaattagaccgaaattatgttgtgtaaatagtcagaaactatatctcagttattgactatttacacaacataatttctgaanaaaaaaaaaaaaaaaaaaaaaaaaaaaagggggggccccccaaaataggcctgtcccccccgggattattttcggggggggttcctgggggggaaacgttttccccaaaaggggggtt

SEQ ID NO: 88869 - DNA, 254 bp, Glycine max
  Clone ID: 700906767H1
ctctacttttcaaagacgcacgcagcgttgtataaccctaatcgggtatgtgcaaagagagctttgtagcacgtgcttaaggtatgttttaaacattgcttgtttcttttgttccttttgatgtcatggtggcattgtgatgcaaaatgtgtgtgagctcatactgagaaggagctcatctgctaagtccatttgaagaggatgtatggaagggcatcatcaggtcttgataggtttaagaaggctcagagctt

SEQ ID NO: 88870 - DNA, 264 bp, Glycine max
  Clone ID: 700906768H1
aaaacgactaaaattatagaagcacagcgaagccatagaaattatcttgtaaaacaagtcaacaaggcttctacagtgattgtggacaaaccacttctaacaatcatatagaagaatcaaaaaaacctgcaacatttcattggtggtgataactttgttaagaaagacatctatatcacaattaattaaagcaagaatcttagctttcaatattatttagcaagaggagaatgatttaagtgaacaagaagtgccactgacgaa

SEQ ID NO: 88871 - DNA, 261 bp, Glycine max
  Clone ID: 700906770H1
ctcatccaaaagttgacccatttactggggagatgtttacatttggctatgcgcatacaccaccatatatcacatacagtctaatttcaaaggatggttatatgcatgatcctgtacccataacagtatcagatcccatcatgatgcacgactttgccatcacagagaattatgcaatatttttggatcttcctttgatttttaggctttaggaaatggtgaagaataagacactgatattctcatttgattcaaccaaga

SEQ ID NO: 88872 - DNA, 260 bp, Glycine max
  Clone ID: 700906773H1
agcaaatgatgatgcccaaactgaactttaaacctaacttaaagtaaagagggtctagttctgttgattaaacagaatgtataaatattgtaaaaccttttgataccatgtttaattcttatacataagaattaaacatggtatcaaaaggttttacaatatttaattcttatgtataagaaaaattatgatgttaaaaatctagaaagtgacttgaatcaatataaataaatttgtgaattcaatcacagtttgaatat

SEQ ID NO: 88873 - DNA, 260 bp, Glycine max
  unsure (1)..(260): unsure at all n locations
  Clone ID: 700906774H1
ggctttggccaagttgccaccaaacgcttcatccgttccagcagttttagctgttcgagattccatcgtggacccacgcaacatccacctcctaanaacattgatccagtgcaacttcccaccttatggaaaggatcttcagggaggctacccaacgggtcgattttgcaatggaaaaattcctactgacttaatagttgaacaattgggtattaaggagtatttgcctgcatatttggatccgaatctcaaatctagtg

SEQ ID NO: 88874 - DNA, 258 bp, Glycine max
  Clone ID: 700906775H1
caaggatgagtaaacaagacatgatgaaaagtcagaattgccttctcaaggtcaatatccactgcgatggctgtgaacagaaagtaaagaaaatcctgcagaaaattgatggggtgtattctgtgaacatagatgcggagcgagggaaggtgatggtgtcagggcatgtagatccagctaaactgataaaaaagctgaagaggtcagggaagcatgccgaactttggggtggccagagaggcatgatgtacaaccaaa

SEQ ID NO: 88875 - DNA, 255 bp, Glycine max
  Clone ID: 700906776H1
ctgaattgtaggggttgaatgatgattgcgaacattttgagtcttttccacctggtcacttgtattctagcaaagagagagcgttccgcagatggtacaatcctccatggttctcttctgctattccatctgccccttatgatcctcttgctttgaggcatgcctttgagaaggctgtggtaaaaaggttgatgactgatgtgcactttggtgttttgctctctggaggtttggactcttcattggttgcagccg

SEQ ID NO: 88876 - DNA, 256 bp, Glycine max
  Clone ID: 700906777H1
caaggatgtgtaaacaagacatgatgaaaagtcagatttgccttctcaaggtcaatatccactgcgatggctgtgaacagaaagtaaagaaaatcctgcagaaaatttctggggtgtattctgtgaacatagatgcggagcgagggaaggtgatggtgtcagggcatgtagatccagctaaactgataaaaaagctgaagaggtcagggacgcatttcgaactttggggtggccagagaggcatgatgtacaacca

SEQ ID NO: 88877 - DNA, 257 bp, Glycine max
  Clone ID: 700906778H1
cccgtacagacccacctccaaagagatcatttttattaccaattttccgatttcacagagaaaattctttctgggcatctcttcaaaaatgtcaagcttccccaacacggtggcggtaggccgcaggtccggcaaggcaccggaaaaatccaccttttctcagacttgcagcctcttgagccagttcttgaaggagaaacgtgcttctgctgattccacccttggaattggtcgaaaaatggaacctaaagcgaata

SEQ ID NO: 88878 - DNA, 265 bp, Glycine max
  unsure (1)..(265): unsure at all n locations
  Clone ID: 700906781H1
ctgactcatacccaaattatttattgtttgtctacgaaagcagtgaaaaaaaatgacagtggagcttaatggggttccccaaaatggaggaacagaaggcaattcaagaagctgcctccgaaggcctcaaggccatggaacacctcctccgtctcctatcctatcaaccctctcacctccacgctcaatacacttttgtcantttttccaacttcaaaaaactcatctccttactcagccgccgcaccggccacgctcgtttccg

SEQ ID NO: 88879 - DNA, 250 bp, Glycine max
  unsure (1)..(250): unsure at all n locations
  Clone ID: 700906783H1
caaaaaattcaacaccaccaagaggtttcaacaataatgtctctccagcagcaatagaattttgggagcgacttntntatcacggttataaagcagatgtttgcattaatactgataacggtggcgttgtttatgctcattctaacattcttgccatgtctactcctgttttcaggggcatgttgaagcaagcaaattgtcatcgtcgatggcgaacaatctcaattactggggttccacatgatgcagt

SEQ ID NO: 88880 - DNA, 77 bp, Glycine max
  Clone ID: 700906784H1
gtatggtctatgaaagccaatttgtctggtgtcagctgttgtgaaattggggtgcttaatattctacaaggaaattt

SEQ ID NO: 88881 - DNA, 253 bp, Glycine max
  Clone ID: 700906788H1
gcatatcatatttgcatacattccttattgtttatactgtaatatggttttgaagattgtgatactgatcctaggcctaaccctcatgctcctatttggtctcctctgaggtggcatccacgaatacaaacgagtaggacaatggagtggatgatgctaaatatcccggtgtaagctaatgagggggttacccaggtcatggcggtggcggttatcctgaccatggcggtgacggttatcctggccatggcgg

SEQ ID NO: 88882 - DNA, 150 bp, Glycine max
  Clone ID: 700906789H1
ttccttctcaaaattgagatggacctacttgattcttgaatttatcaatagacaggtatctcttctgaatgataagaaacagcagcctacaaatcggcactagatcaattcaagaatcaagtttttccttctcaaaattgagaggggctt

SEQ ID NO: 88883 - DNA, 252 bp, Glycine max
  Clone ID: 700906794H1
caacgccgtactatcgtttccgagaaccatctctttttttctcgccgctcttccccgcaatcgcatcgcgcgttttgcttctccttttatcgcagattctctgcgtcgtcaccagactcacttccgtgattcgaacgcggcgtggggaagagaaaaccctaatccgacatggggaagaagaagccgacggcgagggacgaagagaacgcgtcgcagcaaggcggcggcgggaaatcgaagaagaaggcggtt

SEQ ID NO: 88884 - DNA, 202 bp, Glycine max
  Clone ID: 700906796H1
atttcaaagtccagtaataaagctcttagatcattgatttttttttttttagtttttgttgctatttgggacagtttggacaagagcaaatatttcatttagttgccaatcgatctagttaggtgatgtattttgattttgcattttgcattttgtgaaacacaattaaagagaaaatgaagaaagttagcaagttggtatg

SEQ ID NO: 88885 - DNA, 257 bp, Glycine max
  Clone ID: 700906803H1
cgagataactagaaacagtgtgatgaaaatgaaggtccttgttttcttcgttgctacaattttggtagcatggcaatgccatgcgtacgatatcgttccctctccgaatgaacactggctatggtgcccgtactcggaggtgaaatgcgcaagttggaggcttgctgtggaagcacacaacatctttggctttgagaccattcctgaagagtgcgttgaagcaacaaaggaatgaatccatggcgaacaatatagat

SEQ ID NO: 88886 - DNA, 259 bp, Glycine max
  Clone ID: 700906808H1
cgcgaagagtcgagggttgccgttgatttggaatctgtggcgacgcacgagataggtcacgtgcttgggttgggtcactcttcggtgaaggaagcggtcatgtacccgagctacagccccaggagaaagaaggttgcttgagaattgatgacgtggcaggagtccaagctctttacggctctaacccaaactttacttttagttctttgttgcagtctcagaattcattaaacgctgccgttgggttggaaacggtttc

SEQ ID NO: 88887 - DNA, 262 bp, Glycine max
  Clone ID: 700906809H1
gaacagaacaaaggcaaaaccttcacttgatattattttcctctacttccaggtttcttcttccctccattcaatcatcaaaacattctcctttagcaacaatggcaggtgcaatccaaaaactaccccttgaacaatccaagaggacccaaataagttctattaccatttcctctacaaagccacactagtcctcatcttcttcgttatcatcccattgtttccctcacaggctcctgaattcatcaaccaatcgctcctc

SEQ ID NO: 88888 - DNA, 256 bp, Glycine max
  Clone ID: 700906810H1
gtcaatgacagtctgggaataattgccaatgcacacactgtctttgcagataaagaacatttgaaagcaatgtctgatcaatgtgttaagcttgcaaggttgttttcaacagcagttgactttcctaaaactggtgtccagctgttatacctcctgaacttcatgtcaaagaatatcctgacttcatggagaagcctgacaaacccacatacaaatcgcataacgtgataggagagctctttagggaagtgaaaga

SEQ ID NO: 88889 - DNA, 258 bp, Glycine max
  Clone ID: 700906811H1
atctcttctctcttccttttcagatcacacgcacacagttaagctcttcaaatctatatcttctcagcgattcttgcttcaagttccagaaatgggtgtggcacaaaacattcctgatgcggaggagggaaccttgagattggaatggaatacagaactgtttctggagttgctgggccattggtcattcttgataaagttaagggacccaagtttcaagagattgttaacattcgcttaggagatggtactactcgg

SEQ ID NO: 88890 - DNA, 257 bp, Glycine max
  Clone ID: 700906814H1
atttttgatcagaatgagcgtccagacgtatagattcatttaaaagagtatgcttatttatttattactacaaactagataactaataaagtatagtttgtagtaataaataaataagcatactcttttaaatgatctatactttattagttatctagtttttattgaacgagatgtgtcacttgcactcatggctttgtggtttgagatctcaaaccatataagtatgggttcgattgttgcatcaacaaaaaaca

SEQ ID NO: 88891 - DNA, 258 bp, Glycine max
  Clone ID: 700906817H1
cttattatactctagccttgcaccctgaaagaaaacaggaaagaggaaactagtgcaaagattaacatcattaacaccatatcaaagtgaaaaatataggctaagaaaacattatattgagacattcagaatttagattatttttcatatacattttctctcatgctttatattttgttgatgctcttgtgtccagtttcacacctaatctgactatttactttgtttattggtactgttatttcagatatattgtca

SEQ ID NO: 88892 - DNA, 257 bp, Glycine max
  Clone ID: 700906818H1
tcttttaatgggtattttggttccaagactaagctcgaaaacaattcgtcaggctgtgggtgttgtgggttgtgtcattatgcctcacaatgtattcctgcattctgctttggtgcaatcaaggaaggttgatctaaaaagataggtcgggtgcaggaggctctcaactactattcaattgaatcggcggcggcacttgcagtctccttcatgatcaatctatttgtcacaacagtttttgctaagggtttttatgg

SEQ ID NO: 88893 - DNA, 124 bp, Glycine max
  Clone ID: 700906821H1
ttctcgatcctcatcggctcgagctaatggtctacgttctgcggagcaccgacgtcgagatactaggcacagcgtcatcggttttctacccccattactcttgtttgctcgttctctgccggtg

SEQ ID NO: 88894 - DNA, 255 bp, Glycine max
  Clone ID: 700906822H1
agaaaatcctcaattttctgagcagccaaacactctctctctgtctctcgaaaattctcagtttgcagagaaaatctgaatcatgtcgtggcaagcgtatgtcgacgatcaccttctgtgtgacatcgaaggaaccacctcactcacgctgctatcatcggccaagacggcagcgtttgggctcagagtaccgacttccctcagttcaaacctgaggagataactgccatcatgaatgactttaatgagcctgga

SEQ ID NO: 88895 - DNA, 254 bp, Glycine max
  Clone ID: 700906823H1
ggatttgggtattggagatcgtgttcgccatatttctctgtgggaccctctcatgcaccgcccaacctcatcataatagggtttctctctcaaccaccacaagtatctgtcccgccggctcccttctcgattcgtcttagggtttccagattccacttgtccccttctcaattctcttggatccattgccgtcatcgagggagatgaagtttctttgcagaaggctctgaatatggttcacaagaataatcatg

SEQ ID NO: 88896 - DNA, 252 bp, Glycine max
  Clone ID: 700906824H1
gaaatacatgccaaacctaaccagttgaaatgacactccctttatactatatacttatctcccttcaattaatctccatcttaggtttgtgtctatcttacaataatgatgttgatttgttgagacaacttcgtcggtatttccagtgatcagcaatattttccattggcactttaatttcctaccctagctagttgatgttgtgttttcataaatgacaatctggaccaagccacaaaaaaatattctgcc

SEQ ID NO: 88897 - DNA, 96 bp, Glycine max
  Clone ID: 700906825H1
tctcacggcaattttataggtcctccaagaaagagagatagtgagaggaaaacgagaccaagggagaaaaacaaccaccgtccaaaccaccacaca

SEQ ID NO: 88898 - DNA, 253 bp, Glycine max
  Clone ID: 700906826H1
gaaattagggttgaaggtgatctacccaggccttgaagatcacccacagcacaaattgctgaaatcaatagccaacagggaatatggctacggtgggcttctttgcattgacatgggaacggtggagagggaaacctgttaatggctcacttgcaaaatgatgctcaatttggattcatggctgttagcttggggtattatgagaccctcatgtcctgctctggtagcagcactagcagtgagatgactgagg

SEQ ID NO: 88899 - DNA, 253 bp, Glycine max
  Clone ID: 700906827H1
agcaacgtgaacctaacctaaccaccatgtctttcttctctttcttgaagtataaacaccttgtctttggtcatcttatatatgttaattttgttgcctaggttcaagaagacctcagcttcatccaacagtggagtccttcttcatagaccacctcaaccctttgctaccgaagcctgccttgtcggagcactcaacctcaaaccccgcctcctcctctgaacacatccccgccgtcatgtataccgtcgtg

SEQ ID NO: 88900 - DNA, 254 bp, Glycine max
  Clone ID: 700906829H1
agactgtttcatgacagtgcccttgctgatgaagatacttatgagcctttcctaagattgctctggaaaggaaattggttcatacaagagaaaagttgtaagatcctcgctttaattgttagtgtcaggccaaaaatcagaatggcattgtgtcaaatggagaagcatcaaatggaaagaagccatttaccactattgatgatgttttgataggattggtaaaatggctttgtgatcagttgaagaaaccttct

SEQ ID NO: 88901 - DNA, 253 bp, Glycine max
  Clone ID: 700906830H1
cttttgtcattctcttctacttactctgcctaacggaaagctgtataacgcctctgcctcgccggaaaacttaaaattcgacgcctcgacggaaaagcggctgctaaactgcgcgaccacccaattttcttgcaaatcagatccagaaacagctatgtctggcaattcgaattgcagtgtttacataggcaatctggagagacgggtgacggacagggtcttgtatgatatattaattcaagcaggaagagtg

SEQ ID NO: 88902 - DNA, 254 bp, Glycine max
  Clone ID: 700906831H1
caaatccgccgtgcaaattgaccagctcactatgtactccggtgtcttgggtgatcccagggataatggggatttatatcccggcttcaacggcggtgggaccgtgaccggagccaccagcaaaggcaacatgacgggtccagcagtgacgatgggggggacttcttcgggatgatattcagaggtggcagcagcagcagcagcagcagccaagcagcgccaccatcgtccgttctatttgtttcaatcttttt

SEQ ID NO: 88903 - DNA, 252 bp, Glycine max
  Clone ID: 700906833H1
ggagtctcggagctgccatcatctacaacagagaccatgcatgggatgaccaatggattttctgggttggacctttcattggagctgcccttgctgctgtgtatcaccagatagtcatccgagccatcctttcaagacaagggcttaggctccttgtttttgtatgtgcttgcttgtattagttgtaatttatgtatctggagtcttcttcatttggaaattcatgtgaatctttttgttttaatccattgt

SEQ ID NO: 88904 - DNA, 253 bp, Glycine max
  unsure (1)..(253): unsure at all n locations
  Clone ID: 700906835H1
atacattcgtgtacgatatccatatgttaaagccgtaacctatggactatcacacaacagttctgatactgattacctttgtgagtgcaaccattagtctcatattcattcggagattattcaaccaaactcagaatcagaatatgcaaagcttccaccagggcctcgtccatttcctatcataggaaacatcttggaacttggcacaaatccacacatagcataatttagantctcaaagatttatggacct

SEQ ID NO: 88905 - DNA, 255 bp, Glycine max
  unsure (1)..(255): unsure at all n locations
  Clone ID: 700906836H1
tacttttcttcccttctttccagaacaacaccacaccacatacaacacaaaaaaaagntnnannaatggcgggttacagagaggaggaggatttcgattaactcttcaaggtggtcctgatcggcgattcggcgtgggcaagtcccaacctcctctctcgcttcaccaagaacgagttcaacttggagtccaagtccaccattggcgtcgagttcgccacccgcaccttgaacgtcgattccaaagtcatcaagg

SEQ ID NO: 88906 - DNA, 255 bp, Glycine max
  Clone ID: 700906837H1
atagagagaaaagaggctaatttattgtgttcatagatacaagacaatgaagaacctttcatagagttgaacaaggtggatcgaaggcatgggaagaggcctctcccttctgatcatgcatcaagggagagagggaaggtttcaacttttctgttaaccaatctccacctaagagccaagggggagaagcttctcaattctcctttatgcatccaatcaatactggtgatgatagcactctttcttcaccaattc

SEQ ID NO: 88907 - DNA, 254 bp, Glycine max
  Clone ID: 700906838H1
gggagggagccgtagcagcggaagctctagcttgggtagcgaatcacaatggcgagaggattaaagaagcatctgaagaggcttaatgccccaaagcattggatgcttgacaaactgggtggtgcatttgtcctaagccctcatctggaccacacaaatcgagggcatgcctgccactcatactcattttgcgaaaccggctgaagtatgctctaacataccgtgaagtcattgctattctgatgcagcgacat

SEQ ID NO: 88908 - DNA, 101 bp, Glycine max
  Clone ID: 700906840H1
ctttcaaccccatccaatcctcacatgcatgctgtgtctgccagagtgccaagtcacataacatttccattgttaccattctttctttccacacaacatac

SEQ ID NO: 88909 - DNA, 249 bp, Glycine max
  Clone ID: 700906841H1
gcttatgaagtttgaatatcagagaaaagttgcaattctacacaacaagaaaaataaaggtgccagtgctgaatccttagaaaagactaaagcagctgttagtcatttgcatacaagatatatccttgcatgcagtcaatggattcaacagtttcagaagtgaaccatattcgagacgtccagttgtatccgaaacttgttgctcttattattgagatggcaaatatgtgggaaaatatgtgcatacat

SEQ ID NO: 88910 - DNA, 246 bp, Glycine max
  Clone ID: 700906846H1
gtcagaacctccagtggcgtggctccgatctgatcgtgcgcgtcgggaagcccgagacgattctcatggagatcgcgatggctgtcggtcatggctgtaccagtgagtaacagatctcgtgagtgtacttttgagagggacggtgaaggtgattgttattgattttctggatctttcatttttgtgatttataaatttgatatgttgcactgccacaagtaacaggggagactatgtttttgaggt

SEQ ID NO: 88911 - DNA, 247 bp, Glycine max
  Clone ID: 700906847H1
gaggaggcacaccttcaggagcagtcatggttctcaaaaccgagctgtgccgattcagcggtgccaagatctacccagggaaaggcatcagatttgttcgtggtgattctcaggttttcctgtttgctactcaaaatgtaagaggtatttccacaacaggttgaagccgtcaaagctcacgtggactgcaatgtaccgaaagcagcataagaaggatattgctcaagaagctgtgaagaagagaaga

SEQ ID NO: 88912 - DNA, 249 bp, Glycine max
  Clone ID: 700906850H1
gtttatcatgctgatggtgatgagagagaaagggtcagcaacaagaacagaagaaaagagattcatcacactaatatagattgtacttgattggagcaggattgtccataaaaatacaagccttcattgtggctactacaaggtggttcccttcggattccggtgcctttgcggactggtcggcccctccgtctgctgtctccggccgcggcgacgatctctccctcggcttcaatgcttcatccgcca

SEQ ID NO: 88913 - DNA, 248 bp, Glycine max
  Clone ID: 700906851H1
aaaataaattatggtgtgttgtgtatgttgtgcaagacctggaacttcacctttctacgtacgtgtgctgttaggatgcagtgtgctttgatgatgctttgatgaatatgcagtgtgcttttttaatctattattttcttttattctcttttcataaggactttagttcttccaccgtgcttgattgttgtctcgattataactaaatttccgttatttaagaacaatagttgacattgtggaaaaac

SEQ ID NO: 88914 - DNA, 127 bp, Glycine max
  Clone ID: 700906852H1
ttgaagttttgaagaagaagcatgcttctggaacttataaaagcctagtattttatctagaggcatgtgaatctgggagtatctttgaaggtcttcttccagaaggtctgaatatgcacacaacata

SEQ ID NO: 88915 - DNA, 153 bp, Glycine max
  Clone ID: 700906853H1
ccccgtcaaggccatgaaccctggcttggtttatgatatctcctctaatgattatgtgaatttcttgtgtacttcaaattacaccaccaacactatccgcttcatcactagaaggacttatgattgcgtggggctaaaagggcaggacattct

SEQ ID NO: 88916 - DNA, 249 bp, Glycine max
  Clone ID: 700906857H1
ctcccattttttcaaaacattcaacaatgtcgtatttttcaaggggacgtcgcgacgacgacgacacggtggacgactacgacgagtacgaccccaccccatacggcctctgctacgacattcacccacctacggccgccccgtctctccttcagaagaaacctgctacccactcggagcctcttccgatgaaaacttcgattacgatcgcccccagtacacctcttacgctgaactctctgcttatgg

SEQ ID NO: 88917 - DNA, 247 bp, Glycine max
  Clone ID: 700906860H1
tggaaaagctccatgcttctgtgctcgcccttgtattccttcttgtcatactatttcaggaaggattggtaacatgtatgaagaatgaagacggatcagaagaatggggatatgtgcaagttagccaaaagcccacttgttctggtggctttacagaagtccatacagagtggagaatccctccaagccttggccaatcattctctggcttcagggaggaccaggctcttcaggagttgggtttgga

SEQ ID NO: 88918 - DNA, 140 bp, Glycine max
  Clone ID: 700906861H1
aaatcaaagccatggccacctccaacttctctattgttctctccgtctccctagccttctttttggtgctacttactaaggcacactcgaccgaaaccgtttctttcaccttcaacaagttcaaccagtccacacaacat

SEQ ID NO: 88919 - DNA, 247 bp, Glycine max
  Clone ID: 700906862H1
atcatccgcagctgctgttattcgcaccgcaaacaaacagtgagccatggacgtcggaaagaacaagcgcatctccaaagggaaaaagggtggcaagaagaaggcagctgatccctttgccaagaggattggtatgacattaaggccccttctctttttcaagtgaaaaatgttggcaaaaccctcgtctctcgtacgcagggtaccaagattgcttctgaaggacttaaacatagagtgtttgagg

SEQ ID NO: 88920 - DNA, 247 bp, Glycine max
  Clone ID: 700906865H1
gtttgttaaagaagaataggaatggggagtgaaaagggaacagacagagttgaaatgttaggacgtggtgggaaggcctatgtagcataatatataatacaagtaataaagtatgcaatatatagatgagtgagagtgtgatagtaaggagaaaaagaaagtggtatatattgatatatgtgtgtatttcctttgggcttgaaactcaaaactataataatgggttcttcttctcctccggacacta

SEQ ID NO: 88921 - DNA, 246 bp, Glycine max
  Clone ID: 700906873H1
cgcttttgttattcttcgagtctctgagagagatgtgtggaggcgctatcatctctgacttcattctcctttttgagacttctaatatcctcagggttttttgggagaattggctaaaaaatggtatatgatccgtgtttgtgctatgatgttatttttattttttctttgtttaatggttctgaatgtctctgttcttactgcgatttttacacttttccaattatattaaagggtctaccacag

SEQ ID NO: 88922 - DNA, 245 bp, Glycine max
  Clone ID: 700906874H1
gaacgatactctctcagaacgtgagttacttgaagattacccacttttacggcctttgtaagttgtgaaggtatgcttgtcattctgcttctagccttctagagctatgaactgaaattgggtgtgattgcacaattaaggatcatctccagtagtactgaaataatatcgttaaaactgatgagattgtcctgctactcaatctgcaaggcaattttcagctgcggctaatgacgttgtatcac

SEQ ID NO: 88923 - DNA, 243 bp, Glycine max
  Clone ID: 700906875H1
caagattaccaccacaaagcaatgggcggtatactttctgcgcttcttggcggcgacgcggcggcggcggcgtcttcgccggagagttctacttctagagtctcctccttccactcgtcgccggctggcagctctacttcaacgagatcaaagataccgataagctcgttgtgatagatttctcggcgtcgtggtgcggtccttgcaaattcatagagccagcgattcacgccatggccgaca

SEQ ID NO: 88924 - DNA, 243 bp, Glycine max
  Clone ID: 700906876H1
gcacccagccgcagcagcaagtgatcgaagcgaaaagagagtaatcagcagagaaattcatcgtcgtagttatgggtaaagttcacggatcacttgcacgtgccggtaaggttagaggccaaacccaaaagtggccaagcaggataagaagaagaagccacgtggccgcgctcacaagaggatgcagtataatcgccgattcgtcaccgccgtggtgggattcggcaagaagaggggacctaa

SEQ ID NO: 88925 - DNA, 246 bp, Glycine max
  Clone ID: 700906877H1
gtggggggtgtgagcttaggacaagtgattgtgcctgaactcagccaaagggagaaagtgtgcccttttatcttctttctctctctctttacactttaacacaccaaataaatgaaaggcgtaccttgcctagcccaaccccataagcctctttctttttctctctctcacttgcatacgttcctttcactgtactttttgacacacacgtaacacattcatcagaggaagagagaatgagttcat

SEQ ID NO: 88926 - DNA, 245 bp, Glycine max
  Clone ID: 700906878H1
cagagttgaggcttggtcttcccggattccaatcgcctgaaagggaaccggatcttttctctttaagctcaccaaagcttgatgagaagccactcttccctttgcttcctactaaagacgggattgctcgtcggggcagaaagctgttgtttctggcaacaaaagaggttttgctgataccatggatgggttttctcaggggaagtttgctggtaatacagggatgaacgcggtgctatcaccta

SEQ ID NO: 88927 - DNA, 244 bp, Glycine max
  Clone ID: 700906881H1
aaaacggcctgctaatgctgccaatgggtccaacaatattgtctcaaagaaaggtcgaggtgctggtggtttgcaaaatcaacttgtcaatagagcgctggaaggattgtctggtggtgggaagggggtatgaggggcagaggccggggctggggtggtcgtggaagaggaagaggagggtatcatcggtaactttgttgcagatgtgatgtagaaaacgtcagacttcaccaggctgtactag

SEQ ID NO: 88928 - DNA, 246 bp, Glycine max
  Clone ID: 700906882H1
gtggagttagagctgtccatcatttgcagtgacattatgataattttagatgagcatcttattccatccactaatattgctgagtccacagtgttttattactagatgaaaggagactattacggtatttggcagaatttaaagctggcaatgaaaagaaagaggtggcagatcagtcacttaaagcatatcagacagcttctaccactgctgagagtgaactacaacctacacatcctattcgtt

SEQ ID NO: 88929 - DNA, 247 bp, Glycine max
  Clone ID: 700906883H1
cttggaagtgagtgaagcaaaatgggtagatgtaacaaaatcgtgacgcaagttagccctcttgacaatcttgatcatattgctctgcaaactctgctgcactaactgcttcaccgctttctttcctcactcatgatcccatcttcctccaccaagcaccctttcgacgaagaagaagaagatccacaaataggagcagatacacccaagttaaagtttccaccgtaacttccagagacctgtttcc

SEQ ID NO: 88930 - DNA, 245 bp, Glycine max
  Clone ID: 700906884H1
caaacagtcaaactttcatctttctcattcacttaacccaagtgtaaaaatggcagcattgaatatgtccactgtgagacttccaagagcttccttgtctggaacgacaccagctaggagatctgtgtactcatcaagaatccatcatctttgaggtctgtgaagaacgtgtctaaagtatttggattgaaatcatcttcctttagagtgtcagcgatggcggtatataaagtgaagctgattgg

SEQ ID NO: 88931 - DNA, 243 bp, Glycine max
  Clone ID: 700906885H1
gtttatgctgcaaaatggccactctcagggcagaccaaaattacattgacccctggtagtggaatacctgttggacctgtgatcaatgccggggaaatttatcaagttctacctcttggtggtgaactcatactagagatgtaattgcaatggaagatttggcaagaagcattcagaatcctcctgctgattggcatggtgatccttgcctaccttcgggaaattcttggactggagttacat

SEQ ID NO: 88932 - DNA, 246 bp, Glycine max
  Clone ID: 700906887H1
tggagctaaattaattgagttgaatatgtacgaagtaactggcctgctactgaattgaacgacaaaggggaatgaatcaagcacagttgctgttatggaatccaattcaaaatcattaagccaaatgatttggtttcaaaatcctctcctgaaatttgattttgtactgtttatactcttttctttgtttagaaccaatatattggcatgagttatactatttatgtaatatttctttacaacaaa

SEQ ID NO: 88933 - DNA, 241 bp, Glycine max
  Clone ID: 700906889H1
gggaagttcttggtggaaatccaagttcccgggcagaagtttgtgaacggagttccgttccccgctgtggtgtctcctccacctgcaactgcaactgcggttcctcttacggactccgtcaaacccagaaagctttccttgaatcattgctactccaatcgggtgctgtccttttcaggggattcccactctccaccgcttctcacttcaacgacgctaacgaagcattcggctacgacga

SEQ ID NO: 88934 - DNA, 244 bp, Glycine max
  Clone ID: 700906890H1
ggttcagcttcaacttcaaattctcagtgaaaccaattcagctgagtccaaatcccaaatccgaatcaaaatccgaagtgagatttgcgatggagaggcttcagcgaatgtttgcaggtgcagtggagcgctagggcaccctcccccagattccccaactctcgattcctccgagcaggtctacatctcctcactcgatctcctcaagatgcttaagcacggaagggctggggttcccatggag

SEQ ID NO: 88935 - DNA, 243 bp, Glycine max
  Clone ID: 700906892H1
gtagctccatcgatctatatcatgtgctctagtttaggaaaattgcatttgcatttgcattgcgtcaagttttaattagtttctgagtggtgtttaattctctcatcaacctagctagcatcaagtgatgaggacatggaatctatgcaatgaatagactctcaggtaccatatgtatgtatgtattaatagaattgcatagggtctttctatgctactttctctttcaccttacaaattctg

SEQ ID NO: 88936 - DNA, 70 bp, Glycine max
  Clone ID: 700906893H1
aatccctcgcctatatcttcagaaaattagatctgcttcagatctagggtttcccttttccacatcacga

SEQ ID NO: 88937 - DNA, 243 bp, Glycine max
  Clone ID: 700906894H1
cgaactcaaaccgtttaagcttctccgagttttgacctacaacactctcgaatcccctcttgtgtgttgtagccgccccgtgaccatcaatggcggaaactgctgtcgacaaatcccaatcctcgctgaggaatattatgtgaaggataagcaaacagctgtagttgaaaaacctgttgaggtcaaagaagttgaaaacccagaggaggctgcttctgaggaacccgttgctgagaaaactgt

SEQ ID NO: 88938 - DNA, 90 bp, Glycine max
  Clone ID: 700906895H1
ccaagatgtccattgccgagaggtattcccatgctaagtggaagatggaagaagcaaagaaaatttctgcaccttccacacaacatacga

SEQ ID NO: 88939 - DNA, 239 bp, Glycine max
  unsure (1)..(239): unsure at all n locations
  Clone ID: 700906896H1
ctctaaaccctaaacaactctttctcttcttccttcgctcgttgttctccctcgcgtagatcgacaatggcggagacagagacgtttgctttccaggctgagatcaaccagctcctcagtctatcatcaacaccttctactccaacaaggactagttcantcgtgaactcatcagcaacgctccgatgctttggacaaaatcgatttgagatttgacagataagagcagctcgtgctca

SEQ ID NO: 88940 - DNA, 262 bp, Glycine max
  Clone ID: 700906901H1
aatcatgccgccattagcgtctctgcaacttcggaggctcttactccgttctcgttccttaccattcacatctccctctccgattcatcactctcctctgtttccccgacattcctcttcccatttctattctcgaactctcttcaccccttcgttcttcataacaagacatttctcatcggaaacccaaacggatgagattgctagctccctctcctcagagcttctcaaagagcaagactccgacgctctctccgtctcg

SEQ ID NO: 88941 - DNA, 264 bp, Glycine max
  Clone ID: 700906904H1
cagcttgatcacaccgcgtttcggagagagacgtcgcaatggggaggaggcctgcaaggtgttatcggcagataaaaaacaagccataccccaaatcacgcttttgccgtggtgttcctgatcctaagatcagaatttatgatgttggtatgaagaagaaaggtgttgatgagtttcccttctgtgttcatctggttagctgggaaaaagaaaatgtttcaagtgaagcattggaagctgctagaattgcatgcaacaaatata

SEQ ID NO: 88942 - DNA, 92 bp, Glycine max
  Clone ID: 700906905H1
gcgatgctttgttcctcttttgttcttccccttcccaatcttcaagtttagggttcctttaatctcgttattcctcttcactcccaagctcc

SEQ ID NO: 88943 - DNA, 267 bp, Glycine max
  Clone ID: 700906908H1
ccaccattgagattgattccttgtatgagggtattgacttctacacaaccatcacccgtgcccgtttcgaagagcttaacatggacctattcaggaagtgcatggagcccgtggagaagtgtttgcgggatgctaagatggacaagagcaccgtccatgatgttgttcttgtcggtggttctactaggattcccaaggttcaacagttgttgcaggacttcttcaacggaaaggagctttgcaagagcattaacccagatgaagctg

SEQ ID NO: 88944 - DNA, 268 bp, Glycine max
  Clone ID: 700906910H1
gccgggccttcaggttggaaacgcctgctgggagctttactgcctcgaacacggcattcagcctgatgggcagatgccaagtgacaagaccgttggtggaggtgatgatgctttcaacaccttcttcagtgaaactggggcaggaaagcacgtgccccgtgcgatttttgtagatcttgagcccactgtgattgatgaggttaggactgggacataccgccaactattccatcctgagcagctccttagtggaaaggaggatgcagca

SEQ ID NO: 88945 - DNA, 266 bp, Glycine max
  Clone ID: 700906911H1
ccaaggttcaatcttgccatcatcaatggcctcagcaagaccttcctccaatggtcttgctgaggccattgatgatagtaagattggaccaagggatgacccagatggttcgttccaagatcttgtctgaagagttcggttgggacaaagatcttgccaagaaaatctggtgctttggccctgagacccttggacccaacatggtggttgatatgtgcaagggagtccagtatttgaatgaaatcaaggattctgtggttgctgga

SEQ ID NO: 88946 - DNA, 268 bp, Glycine max
  Clone ID: 700906913H1
tacatagctatctatttatctatagcaagtgcgtcaagagacacgtggtaccctagctagagtgccattctgtggtttctttctttctttctttctgcatcacatcacaacttgcattgcctcgtgtcctttttcttctttgctctccaaaaatctcacacacacaggtatctggcaaatgggttctcaccaacaagaaccatggctattggagaatgggaaaccaagggttttgaccaaggagaccaggcatggccgttctgcacac

SEQ ID NO: 88947 - DNA, 267 bp, Glycine max
  Clone ID: 700906914H1
aattccatgtgcatgacagcttccctagaggcagtaatgcttctttcatagctctaattatcaaaactaaacatcctgagtcatttgatgactacagaccaatctccttgattggatgtatgtacaaggtgatagctaagttattagcaaatagattgagacaagtgatatctggtcttattgatgagaggcagacaactttcataaaaaacagacacatcctgcatgacatactacgtcttaatgaggtgattgaggaagcttgta

SEQ ID NO: 88948 - DNA, 266 bp, Glycine max
  Clone ID: 700906915H1
tggcgtccatggccactttcttcacccaaacctccttctcctcccactctctctccaaaaccttcgatacccatttcgccccatccccgaaagtcaacgtatttgcgaacttcccggcgaggaggcacgtgggggttcgagtttcgaacgcgctgatcgaaccagacggagggaagctggtggagcttgtggtgagggataattcagaaagagacttgaagaagggtgaggctctttcgttgccgaggatcaagctttcaaggatt

SEQ ID NO: 88949 - DNA, 276 bp, Glycine max
  unsure (1)..(276): unsure at all n locations
  Clone ID: 700906917H1
cctccgaattcagctcgaactgggtccacanagtagcagaaaatggctgtgatcccgtgtcactgttacctaaanctcagatcagacaaaccctacctctccggtcagagtctccgccgtcaagctactttccccaccgtctctgtccaatttcgacgccgaatatcatgtcacgcctcttctgccatcgctcacaaagttgggctgtaaaatttaattcacttagatgcattttgatcaagacactattctgaaaatctagaacgggcacttgag

SEQ ID NO: 88950 - DNA, 96 bp, Glycine max
  Clone ID: 700906918H1
aattagtggtgtattttgattatagattattgtgtggtggagaattgtttattatattgtacccaaattcaactcttcttatctttacgtggaatg

SEQ ID NO: 88951 - DNA, 265 bp, Glycine max
  Clone ID: 700906919H1
tgcgatcttcgaagaagcgtgagagctcaaacacacaacaacaccacatgcctctggctgagacaaccttaactccggtcgctctccggttctttccaagttccatccacgggttttgtgttttccgcacgagatgacggactacaaagagaaagctcaaattgcacgtgcctatctctcttctcaagtaaactttctccatttcttcttcgatcttgtgcaaattttggagttttgtttccccttgttggttctctggaaatta

SEQ ID NO: 88952 - DNA, 261 bp, Glycine max
  Clone ID: 700906920H1
gtgacaaatggagggtccttagttctgtttctctttcttctctctgtgctttcaaccaagttctcaaatcactcttcttcttcacccttctgatctgctaattctcaaggtattcaaaattgggtggttttcgattgaactgtgatgtccaagccactgctaggcatagcggaagaggaaggtcaaagcaatgtcactttgttggtttcttcctcagccaccatggaaagtgtgtgcctgaatagctcaaaactgaaagag

SEQ ID NO: 88953 - DNA, 264 bp, Glycine max
  Clone ID: 700906921H1
ctctcgatctgcactgcaacttccttgtctgacagatcccgtgttccggagaaaggaaaaggcaagaaagatgtcggggcaaacgcagcgtctgaacgtggtccccaccgtgacgatgctgggagtggtcaaggcgcgtctagtcggcgccacgcgcggtcacgcgctcctgaagaagaagagcgacgcgctcacggtgcagttccgccagatcctgaagaagatcgtgtccacgaaagaatctatgggcgacatcatgaaaac

SEQ ID NO: 88954 - DNA, 262 bp, Glycine max
  Clone ID: 700906922H1
atcatcttcttaaaagttaaaaaggccaaggtcctgaatctcacagagacagagagaatgagtacggtgggagaagggaaggtgagtagtaatggtcatggatgttgcaaatcagggccaggctatgcttccccactggaagccatttctggtcccagagagtctctcatttatgtaacctctgtctacacagggaccggaatagagaagccagactatttggcgacagtggatgtggatccaaactctccaacttattcca

SEQ ID NO: 88955 - DNA, 264 bp, Glycine max
  Clone ID: 700906923H1
ctcactctcattttccggtttcactcttctaaaatggcgaatctagcacgcttctccaagagagccctaagaagcgcacacgcgctagcaaggccctacgtgcagcctcagctgctgacagcagaacgcgctttttcgacggatgcgccgacatcgattaccccgtcggcggatcgcgtgaagtgggactaccgtgggcagaggaagataatcccgttggggcagtggctccccaaagttgccgtggatgcttacgtggcaccc

SEQ ID NO: 88956 - DNA, 264 bp, Glycine max
  Clone ID: 700906926H1
caccctctccctagacagagcctctggctctggctttcgttccaaaaaagaatacttgttcggaaaaattgacatgcagctcaagctcgtgcctggtaactctgctggaacagtcactgcctattatttatcttctctggggcctactcatgacgaaatagacttcgagtttttgggtaacttgagtggtgatccttatactctccacacgaacgtataaccacaagggaaagggaacagagaacaacagttccatctatggtt

SEQ ID NO: 88957 - DNA, 266 bp, Glycine max
  Clone ID: 700906928H1
aatcgtcgtcgttatcataatcgggatagtagaagaaaagaaaaggcaagaaagacaggaagaagattaataaaaagaaagtgtagtattctgggagaaagagagaggaaggagaaacagggacaataagcatagggaactgtgaagagctgaaggaacctttgtttttgttggttgttgttgttgttgcgtctggattgggttggctttagggattggaatgccatctggggttttgctctcaggcgatcaaggtccaaagctga

SEQ ID NO: 88958 - DNA, 267 bp, Glycine max
  Clone ID: 700906930H1
ggttgattggtcccattgattccgaagaaaaagaaaagatgtttgagccacaacagctatacactcgcgcgaagaccgaggaattcgacctcgaatcaggagaaaccctctacccagggctgagcgtcggcgagaaccagctccgatggggtttcatccgcaaggtctacggcatcctctccgcgcagatcgtcctcaccaccctcgtctccgtcaccaccgttttctatactccaatcaatgacctcctcaagggcaattccaccc

SEQ ID NO: 88959 - DNA, 236 bp, Glycine max
  Clone ID: 700906931H1
gttaggtttgtctcatcccaacagtttcgcgcgtcgtttttcagcttccgaggtccttgtgaagagcttggatttatatgggaagttggatggtcatgaagggtgtgtgaatgcagtggaatttaactccaccggtgacattcttgtttctggttctgatgaccgacaaattatgttttggaattgggaatccaaaactaaattgtttgcatacccttctggccacacagacaaca

SEQ ID NO: 88960 - DNA, 268 bp, Glycine max
  Clone ID: 700906932H1
accacttcttccttgacttcttgcatggttcgggaaatcgcaaaaccctcacagaatcaagttcatagcctttgtacaatcttaacacccacacaccttttctccatcaatgcttcaattcaagctgcaagccacttccgtgtttcgttcttttcccataattggacatctcagattcttctcactcatttccttcactttgtaactgttttctctgagggcatctattcaagtgagagacgccaacgtaattctgaaatttcgactg

SEQ ID NO: 88961 - DNA, 263 bp, Glycine max
  Clone ID: 700906933H1
ctcgatcttctcttccacggggctcaagatagaagacatgctcatcacttcagggaagttcagcagtgtactcttctgtctatcaaaacagttgggtgcagtgaagattgttcctattgtcctcaatcctctaagtatgatacaggagtcaaaggccaacgccttatgaacaaggaagctgttctccaggctgcaaagaaggcaaaagaggctgggagcactcgcttttgtatgggtgctgcgtggagggatacactaggaag

SEQ ID NO: 88962 - DNA, 262 bp, Glycine max
  Clone ID: 700906935H1
atggcttttacttcttcatgttctcttgcttctcagtttctccctcccatatatcattctgcaatcccttttcactcaacgaactgcacaaatttgtcattccccgctgttccgactccaagacaacaaccactgttgttttcttcaacctcaacttgcttagcagcagcggcggcgtcaaactcaaacagcacttcgaattccaataacaacaaccctgcttcagcttcagcttcgtcgaaagagaagaaagtagaagtgg

SEQ ID NO: 88963 - DNA, 256 bp, Glycine max
  Clone ID: 700906936H1
gattcttgtaactagtatccttgcgtcaggggcttatgctgatgactcggataattcagatgcgttgatatatacagggcacggtgggaatgtgatgaacactgataaagaacctgaagatcagaggcttgagcggggcaatcttgctctgaagaacagtattgaggaaaagaacagtgttaaggtgatacgtggctctgaatcaatggatggaaagtgcaggatatatgtttatgatggactgtatgaggttgag

SEQ ID NO: 88964 - DNA, 262 bp, Glycine max
  Clone ID: 700906937H1
aagaaaaaaaaaaacccttagccaacacaaccatcatggccacctctgctattcagcaatcagcattcactggtcaaactgctctgaagcagctcaatgagttcgtccgcaagaccggtggcgccggcaaaggtcgcactaacatgcgccgcaccgtcaagagtgctcctcagagcatttggtatggccctgaccgtcccaagtacttgggtccattctcggagcagattccatcatacctgaccggagaattccctggtga

SEQ ID NO: 88965 - DNA, 263 bp, Glycine max
  Clone ID: 700906938H1
ctcgagccgattcggctcgagggctaatctctcactcttgttcatcggtctcctcctatactccgctgccgtctgccaccgtcgaacgaatctacgatgaagacaaccttctgatccgtcaagtggtgccggacgcggaggaccaccacctgctcaacgcggagcaccacttctccgccttcaagacaaagttcgccaagacctacgccacgcaggaggagcactaccaccgcttccgtatcttcaagaacaacttgctccgc

SEQ ID NO: 88966 - DNA, 260 bp, Glycine max
  Clone ID: 700906940H1
gcagcgacggaagaagacttcgacatccgcggcggcgatgaaatggatctcggcgaagacgaggtcggcgaggagagggagatcggctctggcggcctcaagatcgagctcctcaaggaaggtcaaggctgggaaacccccgaagtcggtgacgaagtccaagttcattacacggggactttgctcgacgggactaagttcgattcgagccgcgacatggattctcccttcagcttcacgctcggacaagggaaagtaat

SEQ ID NO: 88967 - DNA, 82 bp, Glycine max
  unsure (1)..(82): unsure at all n locations
  Clone ID: 700906941H1
ataaaattgtagcaatcacaacacaaccaaggatagaaattctannaancncaatcttttnnccaaaaatcanacacacatt

SEQ ID NO: 88968 - DNA, 262 bp, Glycine max
  Clone ID: 700906942H1
cattcacctgaggcttccaaagcaatggcttcccttgcagcatccactgctgctgcttcccttggcatgtcagaaatgcttggaaaccccatcaacttcagtggtgccacaaggccagctccatctgcttctagtcctgcctccttcaagactgtggctcttttctccaaaaagaaggctacaccaacacctccaaaaaaagctgctgctgctgctcctgccaatgatgagcttgccaagtggtatggtcctgacagaagga

SEQ ID NO: 88969 - DNA, 261 bp, Glycine max
  Clone ID: 700906944H1
ctccgaaaacgcaagaccctatttggcgtcgtggccatggatttccaagtcgtcgttctcggcggtggcgtctccaagaagctcatccatctcgtttcgcaggagcttccgaacgcgttgcttccgttggcgaatcgccccgttctctcctacgtactcgagtacttggagcttagcaacctcaaagatctcattgtggtggtcgattgctaattttctgctcttcatgttggtgctttggattcgggggcttgtgctgat

SEQ ID NO: 88970 - DNA, 263 bp, Glycine max
  Clone ID: 700906945H1
cccaaaatgcatcatcatcccaaaacgacaacaacagcaacataactccgcctcttccgcgcccccaatgctctactccgacgcggtttcgttgttgtcgtttaagcgtctagcggaccaagacaacaagctcctctactccctcaacgagctgtacgactactgcgagtggcagggcgtgaagtgcgcgcagggcagagtggtcagcttcgtggcccagtccatgggcctgcgaggcccattcccgccgcacactctcacaa

SEQ ID NO: 88971 - DNA, 96 bp, Glycine max
  Clone ID: 700906946H1
gtgttgtctagcattattgatcgtttgtgtgggtgtgtctgtattcgttgtttcccactttccaaatcacatccaacgtgaatccgtcattcaact

SEQ ID NO: 88972 - DNA, 263 bp, Glycine max
  unsure (1)..(263): unsure at all n locations
  Clone ID: 700906947H1
ctcgagccgctctctacaatcagcggtgccgtatgtntataataggaggatctgatgtactcgctcgtggatctcagctatattcacgatcatgatggcccttgaaaattctgaaaatgtgcagataaactgtgaggcatctttaaaatgcctccagggcaagggatttccttgcaattttcaaagtaatgggaattctatagaaggctttacagagcttaaaacatgagcctggtactcaccctgctggggatgttgctgac

SEQ ID NO: 88973 - DNA, 264 bp, Glycine max
  Clone ID: 700906948H1
atttaaagaaaccttggactccccagccagaagaagaaccaacatggcacccacaatctataatttttcgtattctaaaaggttttcagagtcattcaattcttcaacatcaaaaaaggagtcatccagttccaacatccttgctttccactccatagctcaatggaatgctcattataaagccaccaaagaaactaacaagctgatggtacttgatttcacagccacatggtgtggaccttgcaaactcatggaccctgttat

SEQ ID NO: 88974 - DNA, 76 bp, Glycine max
  Clone ID: 700906949H1
cgacgacgacgacgacgacggcggtgatgatgacgctatggatgattggaggatgcgatgtattcagtgagtgtgt

SEQ ID NO: 88975 - DNA, 254 bp, Glycine max
  Clone ID: 700906951H1
cctacttgctgcgctgttaatttattctatattccttttttttttttgggttttttcccttcgtttcaagcttgatccctcacgtagacctatttgaaaagtgttccaattccccaagaattcgaacacgagattattgtctagctctctctgttcgagttctttggaccttggattcgttgcctctccgcaatgctgctatcgtgagttctgtgattctattggatggtgagatcgtggagttcttaacatgg

SEQ ID NO: 88976 - DNA, 263 bp, Glycine max
  unsure (1)..(263): unsure at all n locations
  Clone ID: 700906952H1
caagcgacgccgtttgggtcctcttccacctcgcctacgacaagacnangccttacctccgcctggcgccactcggcgatcctccaccagggtcaactcgcccgtgactcaccgcagagctgccccgcccctgaccccaacctctactacaaggcagtcatcggaatcgtcagccatcccggcgacggcgcctccggccgcctcagcaacgccaccggcgcctcctacatcgccgcctcctatgtcaaattcgttgaggccgc

SEQ ID NO: 88977 - DNA, 259 bp, Glycine max
  Clone ID: 700906953H1
aacgtgtctgacagcaactctgttaactgtgacaccccactcactcgaccattccatttgttaactcagtctcagacacaacacaatccaaaaaacacaacattctggatatgtgaatgacggtgatacctttcgtgcgttttcttttctgtcttcaccccaaaatcacactctctctctctagaaaatggcagcttgcatattcacggtggcacaggacgggaccgcagatttccaaacggtgcaggaggctatcgac

SEQ ID NO: 88978 - DNA, 89 bp, Glycine max
  Clone ID: 700906956H1
tgacttcggaattcccggtgcattttatatgaagaacttcatgcaaaacgagttcgacctcaagtctttaattctcgaagacattccaa

SEQ ID NO: 88979 - DNA, 258 bp, Glycine max
  Clone ID: 700906958H1
gaaaagacgaattggaggttttaagaggagatggaacagggaagagaaaggactttgacagaatctatgattatgatgtctataatgatttgggcaatccagatggtggtgatcctcgcccaatccttggtgggtctagcatctatccctaccctcgcagtgttagaacaggaagagaaaggaccatgacagatcccaacagtgagaaaccgggcgatgtttatgttccaagagatgaaaattttggtcacttgaagt

SEQ ID NO: 88980 - DNA, 260 bp, Glycine max
  Clone ID: 700906960H1
tgtggagtcaatttaccttgcaatcttcctactttatgccccaaggaagcctaggcttacaaccatcaagcttcttctcttactgaatgtgtttgggtttggagccatgcttctatcaactctctacctgtcaaagggagcaaagcgtcttgctatcataggatggatttgccttgttttcaacatcagtgtctttgctgcgcctctcttcattattaggcgtgtcataaagacgaggagcgtggaatacatgccattta

SEQ ID NO: 88981 - DNA, 261 bp, Glycine max
  Clone ID: 700906961H1
caatattcctattattccttatccttctcgaccaatccatttcggcgagtgcttttttaaatttaaatggattgctaaacattgaaaagtggccctctggcgagaaaagtttggaaatgggaaagatagggaaggagacgacagatcatatcaaagaccttttaaagaaactgattgagtcccctcccgaaccaccgaagcaaatcaatattgaagttgaaggcctgtctgtcgtcaaggattacttatctgactacggct

SEQ ID NO: 88982 - DNA, 262 bp, Glycine max
  unsure (1)..(262): unsure at all n locations
  Clone ID: 700906963H1
tattggtatcttctacaatatcctaaagtgtttttctcgttcttcatcaccatgtctttgctttcagacctcatcaacctcaatctctcagaatccacagaaaagatcatagcaaaantacatatgggttggtggatctggtatggacctcagaagcaaagccagggctcttcctgggccagtgagtgaccctgcaaaacttctgaagtggaactatgatgggtctagcacagatcaagctccaggggatgacagtgaagtc

SEQ ID NO: 88983 - DNA, 262 bp, Glycine max
  unsure (1)..(262): unsure at all n locations
  Clone ID: 700906964H1
gccatagactgtgatctgtgatatggaaattgggaactcgtgttatgtaaagatgtgatgtggtttgngtagtgtgaaccgtttgcttgcttcgtgtatgtacattctctccggaggcaccgtcgtgagcttttctctctggtaggtccgtgttgctgaaacctttttgacctttccaataaagcatttgtttcaccctatcaatgagctgaaccattggaataaggattccaaaccccagtatttccaatgccgacagaaa

SEQ ID NO: 88984 - DNA, 171 bp, Glycine max
  unsure (1)..(171): unsure at all n locations
  Clone ID: 700906966H1
tcgatgatccgcatccgaagtcgatcctgtctccggagagctttttaccctaagctacgacgtcacgagcaagatcctcaaatacttccatttctcgcccgaggacgagaggaagtcgccggacatagaaattgccccttcgaacgcgcacgacgatgnanncgcacgact

SEQ ID NO: 88985 - DNA, 60 bp, Glycine max
  Clone ID: 700906967H1
gctcatcattcagctcgatgtgatttctgagttcttgactaatcactgtggtgcatccat

SEQ ID NO: 88986 - DNA, 121 bp, Glycine max
  Clone ID: 700906969H1
tacaacatcagaaatcattttgattgcagaacaatttactctgaccaaagaaggctacacttcgtatgcaagttacatgaaaatggttgtacatggagcttgggcgcatgcaattcaaaga

SEQ ID NO: 88987 - DNA, 254 bp, Glycine max
  Clone ID: 700906970H1
gctccttggttttttagttgttgtgttgttgtcttcaactccacacagttccctcacttctcttccctttgaccattcaaccttcctcgcctttgcctccgtttcgtgagtccactcttcttcgattctagcgtgactgagatggctggaggtgttattcagcagatattgaggaggaaactccaccctcggtttactaactctcccttgttgtcacccatcgtagcaaaaaaagatgatgctggctctactgg

SEQ ID NO: 88988 - DNA, 256 bp, Glycine max
  Clone ID: 700906971H1
gcagatttgataaggtaccacagttgatttgttcattataaaaacaaaactcttgcaaaatttattttccactaatactcaaatattgattttcttttcagaacatacttgcagcaggtacagataccactgcagccacatcagtttgggctatgacagccctagtaaaaaaccctagagtaatgaagaaagttcaagaagaagttagaaatgtggggggaacaaaagatttcttagatgaagatgatattcaaaa

SEQ ID NO: 88989 - DNA, 91 bp, Glycine max
  Clone ID: 700906972H1
ggtctagtgcctatccatatcctcgcagcgggaagaactggtagacaaacgcaacaacaaaaggactctacagagtgcagttcaccatacc

SEQ ID NO: 88990 - DNA, 257 bp, Glycine max
  Clone ID: 700906974H1
ctctttcttcttcttctcttaaaagagcctttgctttttctttaggcctttccgaattaagtacttgtttcattttctctcgaagcaagaaaaatgttcatcgagagtttcaaggttgagagtcctaacgtgaagtacacagagactgagattcagtccgtgtacaactatgaaaccactgaacttgttcacgagaacaagaatggcacttatcagtgggttgtcaagcccaaaactgtcaaatatgaatttaaaac

SEQ ID NO: 88991 - DNA, 86 bp, Glycine max
  Clone ID: 700906977H1
gaaagaacaatggagaagtatttcggaaacgcttatcgtggcgacccgggcgtgccccattcggacccggatcgcttcgtcaacat

SEQ ID NO: 88992 - DNA, 73 bp, Glycine max
  Clone ID: 700906978H1
ctctctctctctgttttgtttttgccctatctcatagggtttcctccttctctccctctcttccacgcaacgt

SEQ ID NO: 88993 - DNA, 232 bp, Glycine max
  Clone ID: 700906980H1
cagagacaaagcgctctctctccaaaaaaaaaaaaaactcgctaaattacaaaaatctcttcaaatcctctcaaccgaacccttattcataaaaccctagattttactttatttgtttccctcaatcgaatcgattttccccttccgaaaaccctaattccttcctcgctatcgaagatggacatcgagcagaagcaatcggagctcatagaccatttcgtaaagcgtgcct

SEQ ID NO: 88994 - DNA, 252 bp, Glycine max
  unsure (1)..(252): unsure at all n locations
  Clone ID: 700906982H1
cgttctgctcctttgcggatcgtgtccgggtgacggttttcttgtagattatttgtttattaaatcgactcccttgttcgcccatacaacagatggcagacaatgaggatggaanggataagactactcgtgggaatgaatgggaggttgtatctctgacagcatcgacatatgcagctgctcctggtgctgatgaagttgagatgaaggatgatgggaacgaagatgtatatggacaagatgaaggagaaa

SEQ ID NO: 88995 - DNA, 187 bp, Glycine max
  unsure (1)..(187): unsure at all n locations
  Clone ID: 700906983H1
tttgctactgncttgtttttggtcatctgagcggcgagccctgctcgcagcggtagagttgtggccttgagtgactatgtagagacatgggttcggaatccggacaacaacctcttttacatatcgtagggtaacgctgcgtccaacatccctccttcataccttcgctagcacaagctccgggcaa

SEQ ID NO: 88996 - DNA, 252 bp, Glycine max
  Clone ID: 700906984H1
cgttcgttgacttaagctctctcttctcctcgacccttggtcgctctcaaaacccttgctgtgcattttcagctaaacctgagcacgcccaactgagattgtagcttcagattccgaggtgagagcagaaagaagagaggttggagctacccagagttcgattttgggttgttcaacaaggtcaagatgtttctgagcttgatggatattatgtagatcaagaggggtgtgtggattggggaagcaattgtt

SEQ ID NO: 88997 - DNA, 254 bp, Glycine max
  Clone ID: 700906985H1
gtcaaaggaataacagaatatgtctcttatgctgcaattgagaatttggtgcttggtcaagcctccaggcatggctttattagattcaagtcaagtacgccaagcaacatattaaagggggcgccagatttctgtactgtgtatgtgatttctaagggcagaatctcttcagttcggagtgctgctcgaacagccccacatgcctccccattgctgaggcacatacagattctacatgacgagaatgcacgtga

SEQ ID NO: 88998 - DNA, 255 bp, Glycine max
  Clone ID: 700906987H1
taaaagttcaaactgtctgagttttgcagaatccacggagctaagaatctcattgtagaagaagaagcactttcacagaaaacatgaaagggttaggtcctcatgcccctttggtttcaaggggaaagcttcctccttcgttggcagtagtggatgccttgccaacatgctcttcttatttctctagaaccaccgtcctatacccattaagatgcagacaaaaatcaaggttgagcttggcccgtggcacaattc

SEQ ID NO: 88999 - DNA, 252 bp, Glycine max
  Clone ID: 700906988H1
tggggttgtttctaatggttgctaagctctactgtgtttgaaggaggcggtcctatccatttcagtggcatatattggttcttagaagtattttatcagaaacttggtaccgcctgattttatctttcttgcctcttctcttgcagtctgaagatagagattggttgcctagtgaagataaagatctgtatattgagattggctgggcggagttacttcatagaatgctagcaccaatcccttctcattggg

SEQ ID NO: 89000 - DNA, 244 bp, Glycine max
  unsure (1)..(244): unsure at all n locations
  Clone ID: 700906989H1
cacacttcctctctcttcctctccgtcttccatagtcaatttggccgtcaatngcggcctccgaagctctcaacggcacaatcaccacctccatcatgcacgcgttcggcaacgtcctcgcgttcttcatacttctcatgatcggcgttctcgccttctcgatccgtctcttctccgttataaagtatgagagtgttattcacgagtttgatccttatttcaactatagagtcactcagttttt

SEQ ID NO: 89001 - DNA, 224 bp, Glycine max
  Clone ID: 700906990H1
gctgaaaataaagtgaaagaaggccaaaatacaagcattagtgagaaaagtcctaaggaagagtcagacgttagccagctgaaggatactgatcctcctgatggatctagtaaactagagttgagtgacaagaatactccacaacattgaaatttaactatattgtaagaatctcagctggtaacttaaggctaagaagacaaggtctcacagttcgtgggaag

SEQ ID NO: 89002 - DNA, 252 bp, Glycine max
  Clone ID: 700906991H1
aggagaaagagaaggtggaggagaggtacactcattggaagtctctggttcccgttctctacgattggctcgccaaccacaacctcgtctggccttctctttcttgcagatggggtcctcagctagagcaagccacttacaagaaccgccaccgtctctatctttccgaacagactgatggcagtgttcccaatacccttgttattgccaactgcgaggttgttaaacccagggttgctgctgctgagcaca

SEQ ID NO: 89003 - DNA, 254 bp, Glycine max
  Clone ID: 700906992H1
gttctagatcgcgagctgccgcccttttttttttttttttttttttttttttttttcgggaaaagggaaaagttgggtttttttttgggggccaagggaattttcttttaaaattaaaaaaaaaaaacccccccaatttttgaaaaaaacaggggggaaattgggtaagggggcctttttttcaaaaaggttttttcaaaaaggggggggcccgatttgtccccaaaaaaggggggaaatgggaaacttgtttt

SEQ ID NO: 89004 - DNA, 256 bp, Glycine max
  unsure (1)..(256): unsure at all n locations
  Clone ID: 700906993H1
cttttcttctcgcagagcgaaatcccaatcccacacaactggcaagacaggnaanntntgnttntctcttctncggaaatcccagatgtgtctgttctcccaaatgctccctctccctccctaacaactctctccacctcaaccctctccgcacgcgcccttctctctccctcacgcgcccctcgcacactcgccgctccttcgtcgtcaaagcctcctccagcgagcttccgctagttggaaacaccgcaccgga

SEQ ID NO: 89005 - DNA, 255 bp, Glycine max
  Clone ID: 700906994H1
caacttaagagatcaatatggccaccaccactacccagcctccctctaatatctgttttttccttctgttgttgcttctagcacactttcatttgggcataagccaacttgagctgaattactactctaaaagctgcccaaaagctgaagagatcatcaaggaacaagtcacacaactatataacaagcatggaaacactgccgtttcgtgggtcagaaatctcttccacgattgcgtggttaagtcatgcgatg

SEQ ID NO: 89006 - DNA, 257 bp, Glycine max
  Clone ID: 700906996H1
ctggccccgagggtgtccgaggtcgtaattcagacaatacacttatacaagaaaaacttggttgggctccaactatgaggttgaaggatggactgaggatcacatacttctggattaaggagcagatcgagaaggagaaggctcaaggtattgatatatcagtgtatgggtcttccaaagtggtgcagactcaagccccagttcaactaggctcacttcgagcagcagatggcaaagaatgaggtggtcaacatatg

SEQ ID NO: 89007 - DNA, 275 bp, Glycine max
  Clone ID: 700907001H1
tgtgatatctttggggagagaggaattttacttggtgctgttcatggagttgtggaatccttgtttaggagatacactgataatggaatgaacgaagatctggcctataagaatactgttgagtctataacagggattatatctaaaaccatctcaactaagggcatgctagctgtatacaatgctttatctgaagatagaaaagggaatttgagaaggcttatagtgcttcttattatccttgcatggaaattctgtatgagtgctatgaggat

SEQ ID NO: 89008 - DNA, 90 bp, Glycine max
  Clone ID: 700907002H1
cttggcaggactgtgcgattttcatgttcaaaaaattattggcttagacaataattttttgaacatgaaaatggacagtgcttggcagga

SEQ ID NO: 89009 - DNA, 89 bp, Glycine max
  Clone ID: 700907003H1
gaaagggacgccaaagcgaaaccctaaccctaacggagagatggcggacacttggcatcgatattcgggacggagaaggacagggtgaa

SEQ ID NO: 89010 - DNA, 261 bp, Glycine max
  Clone ID: 700907004H1
ggatgcacttgttgagtccgaagatggatgcaaagttcaagaaactggctgtagcacatctagcactatttcaaatgaacatctcacaaagatagctgctgaagctatgagtgaaattgctgaatcagatactagtccaagccagttgctggataatgttgaaaacagagtgctagaaggagattcatctgtctcaccgaaaagcattcaatttccgtgctggttggtgcttctctatttcgttttattaaaggaaaaggg

SEQ ID NO: 89011 - DNA, 271 bp, Glycine max
  Clone ID: 700907006H1
tggttcatgatttcagaggttttgccggctggtgatagtgccttgtctattggtgagtgtagattattcagttgctaatttaggatgataatagtcatttgtgggattcatcaaggcagctttcgatagaatcacaggatggatgactccttaggtgtgacctaatctctcgcggtttgtgcagaaaaaccccttgttcatattttgtattttttttcaccaattaattttaggggaattgatgtaccataattgcagtaatatatggttt

SEQ ID NO: 89012 - DNA, 266 bp, Glycine max
  Clone ID: 700907007H1
cttaagagtaccctttacaaattaacattaagaacatgatgtcaaagcattatcatataatatctgattggaacttttttttcttgatttatctgttctgaacttctagatgctaaaaagcgtaagaaatgttcacgacctctggtattacataagaaaaagaggagattgttaccatttgttcctacaaaagacttaaccggagattgaaacagatgggttctcttgcttctgctttaacagccttaaatatggaattcagtgat

SEQ ID NO: 89013 - DNA, 270 bp, Glycine max
  Clone ID: 700907008H1
gttagcttaatcggaatcgccgtcgggaaaaggactattccggcgccggagatgctacggcgggtgaacaatcgaggtgacggcggcgtggttgtggattccggcacgacgttcacgatgttgccggcggggttttataactcggtggtggacgagtttgaccgccgagtcgggcgagacaacaagcgcgcgcgtagattgaagagaaaacgggactcgcgccgtgctattatttgaactccgtggcggacgtaccagctctgacgctgc

SEQ ID NO: 89014 - DNA, 273 bp, Glycine max
  Clone ID: 700907009H1
agaagaaggctgagaacaacaacgaaaaagggtttttggttttggactctgaaagaaactcaaagtgatgcgtttcatcgttctttcgcccaaaccctaacctcgtcctcgtgcattcattccccgcgatcaggtgtgtttttatccattgcaaacagcatgaattttgcagcatcattgtgcagaagattgaatataaggaacttgtgacatatgttcctgtgtatagaagcaccagtggtgtttctggagaaggtttgaatttggcgttca

SEQ ID NO: 89015 - DNA, 96 bp, Glycine max
  Clone ID: 700907010H1
cattagtggtgtattttgattatagattattgtgtggtggagaattgtttattatattgtacccaaattcaactcttcttatctttacgtggaatg

SEQ ID NO: 89016 - DNA, 194 bp, Glycine max
  Clone ID: 700907011H1
tttcaaaactaggttcttgatcggcggtggtcaattttcattgctgtttgtttttgatgagtactgttttttgttttgatggtaagaagagtctgagatatttcgaatttcacaagcagctatagggttttagtccatttcctttgctgctgagggatgttttaagttgcatttaatttataacgaagttttat

SEQ ID NO: 89017 - DNA, 269 bp, Glycine max
  Clone ID: 700907013H1
atccaacaacattcgatcttgatgatgattcatcaactacatcatgtccaaattacttcaaatggatccatgaagatctaaaaccatggaagagtaaaggaatcacaagagacatggttgaaagaggcaaaaacgtttcccattttaggcttgtaattgtaaatggaaaagcttatgttgaaaagtatgacaaatgtatcagacaagagatgtgttcacaatatggggaattttacaacttctaaggttatacccgggaaagataccag

SEQ ID NO: 89018 - DNA, 269 bp, Glycine max
  Clone ID: 700907014H1
gaaagagggaacaagaagttgacggtagcagaatggtggtctccagtacaaatccccacaataaggagatagctatcaggaggaggattgctagcatatttaataaacgtgaagatgatttcccatctttgagagaatataatgattacttggaggaagtagaggacatgacatttaacttgattgaaggaataatgtttcagatattgaagcaaaaattgccaaataccaggaagaaaatgcagaacaaataatgattaatcgagctc

SEQ ID NO: 89019 - DNA, 90 bp, Glycine max
  Clone ID: 700907015H1
ccttcctgtgcttgcgtgcgtccttgccatcattttagcaatggaatgcttcggatgatggttctgtcagttctccttcccacacaacat

SEQ ID NO: 89020 - DNA, 268 bp, Glycine max
  Clone ID: 700907016H1
atcaaaacaaccttctttctttcaggttcttgatcagtgtcaaaaccaaaagggtggttgcaaattgcaatggctaagcatgatgttgagggtggttccttcgctgcaaaggactaccatgatcctcctccagcaccattgattgatgctgaggaactcacacagtggtccttctacagggctttgattgctgagttcattgccacaatgctcttcctttacatcacagtgctcactgtgattggttacaagagccagagtgatgtaa

SEQ ID NO: 89021 - DNA, 256 bp, Glycine max
  unsure (1)..(256): unsure at all n locations
  Clone ID: 700907018H1
gccgcaaaggcgccactgccggacgctttccttcagttcctggagaccaacgggctcgacccttccatttacactgctattgattccacaccacgttagatatcgttgaaacncggtttcgaatcatgtattgaagaggttgaagcagaggtgaaatgcaaactcgaaaaattagagtggttaccgggattttatctcttccacctcacgttcaaattaattgnnctagggcataccgagaagggaagatatatgg

SEQ ID NO: 89022 - DNA, 233 bp, Glycine max
  Clone ID: 700907019H1
cgcttgataactccaactctgtttgctatgtgcatcaagattcagtttagttaaatgatgtgttggttatcttagttgtagaaaaccctgaatagtattattgagatattacgaattcagtttgatcctggaagggacatctcgcctaagcctacatgatgatgccgccgcagccgcagcccccccagatgtgggccccatcggcccagcctctgtcccaatcggtagctcct

SEQ ID NO: 89023 - DNA, 87 bp, Glycine max
  Clone ID: 700907021H1
gaagaagtgagggcaagaactttgcagcataccagcatgagcatgaagctcttccagctcttctccctactcccattcttcctctac

SEQ ID NO: 89024 - DNA, 58 bp, Glycine max
  Clone ID: 700907023H1
attcattcccgtcgctgaatcatcttcaaaattcaaaagcaagatccacacaacatac

SEQ ID NO: 89025 - DNA, 265 bp, Glycine max
  Clone ID: 700907027H1
ctcaatttcttccttctctctctatctttatccgctggtattcttcttcagcagaagctataaggtttcaagaaagcttataaaaggagagaacatctgtttttatcaagctctgatggcagggttaaattttgaagccacatataatgacaactatgatattctgtagatatttgcagctgaaggtgttgattccttttatcttgtgaaggaaaggtacccgtatcagaatgcaatgggaaaattatatgcctatttttcactg

SEQ ID NO: 89026 - DNA, 265 bp, Glycine max
  Clone ID: 700907028H1
atatatgtaaaaataaattggggatcaaacagactctctaaactcttccaaaacactctagaattccccacttatttccacaactcactctatatatcagagacactctagaggcttactcacaggaaataaaagatctagccatagttattataggccttatgggaaaagctttgaagattcaagaaagggaaataagagaattatttgaagatggaatacaactaatgaggatgaactattaccctccatgccctgaaccaga

SEQ ID NO: 89027 - DNA, 87 bp, Glycine max
  Clone ID: 700907029H1
ttctgtccatccctgtcatcctcaagttggctgatgctcttgacattgctgtgaaatctgtgaggtacactcgtggaagtttcattt

SEQ ID NO: 89028 - DNA, 267 bp, Glycine max
  Clone ID: 700907030H1
gcaatggaggcgattaggaagagtaggattcttatattggaggaactggttacatagggaagtatatggtgaaggcaagcgtcacgttaggccatccaacttttgtctacactcgccctcttgatgcacaaactccttcctctaaggcacagctttgcaaggagttcaactctatgggggtcacacttgtcctggagaacttgagcatgaccagattctggcagtgattaaacaagtagacattgtgatatgttctcttccataccc

SEQ ID NO: 89029 - DNA, 270 bp, Glycine max
  Clone ID: 700907031H1
cagagaaatccataccagtaacgaagtcagatggcgaaaatcctacacctgcaaaagctgaagttcctgacaacgagtttgaggacagcgcataagaccagaggttatccctgcaaatgagataggggttacatttgcagatattggtgcgttggatgagattaaagaatcacttcaagagctggtaatgcttcccttagaaggccagacctcttcaaaggtgggcttctgaagccatgtagaggtatattgctttttgggcctcctggt

SEQ ID NO: 89030 - DNA, 270 bp, Glycine max
  Clone ID: 700907032H1
gtggagtatgaattgtggaccaacagcaatgacgagtgtggagttaaatgtgatatgttgatggaatttgtgaaagattttaagggtgcggcacagatattggagaaaggtggttatactcaatttacaccccattatataacttggtactgtcctcaggcatttacattgagcaaacagtgcaagtcccagtgcataaatcatggaagatattgtgctccggatcctgagcaagatttcagcactggttatgatgggaaagatgtggtt

SEQ ID NO: 89031 - DNA, 268 bp, Glycine max
  Clone ID: 700907034H1
agtccccccactccttcaaaaatcctctctttttatcctacactctaatcatagtcatcatccaccacctccatcttcccccagtaacaacataacataacattcagagaaaaacaaaactatcatacccacatggatttgcaatgaaagtgagagagtccaattatgcgaacgctttgtgatgcttgtgagatgcggcggctatagttttctgcgccgctgatgaggctgcactttgtcgtgcctgtgatgagaaggttcacatgtg

SEQ ID NO: 89032 - DNA, 263 bp, Glycine max
  Clone ID: 700907035H1
cagaaggaatctactttgcacttggtgttgcgacttcgtggtggcatgcaaatcttcgtgaagactttgacgggaaagaccataactttggaggttgaaagctctgacaccattgataatgtgaaggcaaagatacaggacaaggaaggtattccaccagaccagcagaggcttatttttgcagggaagcactggaagatgggcgtaccctggctgattataatatccagaaggaatccactctgcatttggtgttgaggctt

SEQ ID NO: 89033 - DNA, 264 bp, Glycine max
  Clone ID: 700907036H1
gaatggggaaaccttagcgccagaagaatcatcatgccctctctgtcatcgataacaaccttcattcttcaccctcgtcactcgtcatttctgcttaccacgcctccccttcaaaacttgacaaatttgatttgaagctggggaaggagcatcgggtttagattaacgcaatgctgcaacaagagccaaatccattcagcattccatacgtacagaagatcaggtgaggttgaggagtacgctggatggtacctggtcctggcc

SEQ ID NO: 89034 - DNA, 129 bp, Glycine max
  Clone ID: 700907038H1
aatactagtacagatacagaatgctcatcaagcaaagaagttgatcatccttgtaatctttgcaaggtctagtttcaaaaccaccaccttccctctcctccaacgtgtatggcgtgtaggtacccaaga

SEQ ID NO: 89035 - DNA, 262 bp, Glycine max
  Clone ID: 700907039H1
cgtttttctgacactgcattctcttcccctttcaaagatttaaccttatttgctcgcagatatgcgcggttactgattcgtcgatggtatctgtcgaaaaaattcacatcgaaagggaacgaacacggaaacgccctcgtctcgcgtgggacgtagctcctccctccgcgtctgaggcacaacgggctctgcggtgcccggtgatgaaggtttcgaaagaaagcatgtttcgcctccgaaaagggacgacgatcgagagggc

SEQ ID NO: 89036 - DNA, 266 bp, Glycine max
  Clone ID: 700907040H1
ttctaattctgcaacaagttccaaaccttcaaatctcactgccccaaaaatcctttcttttttaaatagccatttgacttcagcctctacagcagagtcccagatctctgcattccaattcccatggcccgtcgctatgacagtaaccccttcgatgaggaagaagttaaccccttctataatcctggaaggttcccgctgccactaattcaaggctttcacctctgaagccagaacctgttgattataattatggctttggtgcg

SEQ ID NO: 89037 - DNA, 268 bp, Glycine max
  Clone ID: 700907041H1
aaaatctctaattttttcatctgggaagatcggttgacgaatcgacgatccgatcgcttgcgaggaactagggtttcaatcgatcgcatcacacacaaacaatcatgtttagccggatgttcggtaaacctaaacaggaaaccaatgctgttgccactttggacaagctaaacgagacacttgaaatgctggagaaaaaggagaaagtgctccttaaaaaggtggcagcggaagttgaaaaggccaaagaattcacaagggggaagaa

SEQ ID NO: 89038 - DNA, 84 bp, Glycine max
  Clone ID: 700907042H1
cttgctatctgcttcctcgtagtacttcattgagagagacatggacactgtactaagtactacgctgctactcatgttggcatg

SEQ ID NO: 89039 - DNA, 245 bp, Glycine max
  Clone ID: 700907043H1
ccttaatgtaaatccatcttgaagttaattactccccaagccccaagcccaaatacaacacggtttttttctttccttaaaaaaaaaaaaaaaaaagaaaaaaaaaaaaaaagaaaaagaaaaaaaaaaaagataaaaagagggaggatagcggaggggaaccccattaagcaagaggggggggggcgccccgctgggggccccccccggcgggggttttttcgggggggggtcttttggggggg

SEQ ID NO: 89040 - DNA, 248 bp, Glycine max
  Clone ID: 700907044H1
ggagatcaagcaccaaacccaacacacacctctctctctctctctctctctcttgtgctgttgttctatttctcattctttcgcaagtgaatgttgaactgactctgcggttcggttcggtttttttttttttctgtttatggatccgggctctatgataaacgagggttccttcgcgaaaaatgcgagcgtaatacggcgccgtttagcttggcggagatctggcagcatttcccgccggcgattag

SEQ ID NO: 89041 - DNA, 258 bp, Glycine max
  Clone ID: 700907045H1
cgaaaccctaagcttcccctttctttcactctcatcagatcctttcgtcgttgcgcgaaaccctatctctgaaccagcaaacatgtctgcagccatggatatgtcgctcgacgacataatcaagaacaacaaaaagtctggatccggaagttcacgtggccggacccgaccctccggatccggacctactgccggctccccaaccgtgccgccaaccgcgccgcaccttatgcccccgctaaggcgccggaggcaacg

SEQ ID NO: 89042 - DNA, 202 bp, Glycine max
  unsure (1)..(202): unsure at all n locations
  Clone ID: 700907046H1
tctctccctctttcctatcacactttctagatagctagccaatcagagtaagatctaaagatatttcttatatatcctatggtccgagagtgcccttgttctgcgccaaccctttcttccacataacatacgaatttaacntnctctcttgagtcnccttatcantcattactcttcttcttcaacctcaccaaattcaacc

SEQ ID NO: 89043 - DNA, 265 bp, Glycine max
  Clone ID: 700907047H1
gcagtaagcactgagcttgaagtaatagatggacagcagtcgcaatttcttgcttagttctcatgtggcgccatccccacccgtcaaagtcaaagcacaggaaattcgggtatgcaccaaccgcacctgccgcagacagggctcatttcaaaccctagaaactctatctggcctcgctcctccaaacgtcgcgtgaagtcctgcgggtgcttggggcggtgcggtggcggtcccaatctggtggtcctgcctgatggcctcatcg

SEQ ID NO: 89044 - DNA, 84 bp, Glycine max
  Clone ID: 700907049H1
ggcaaggactttgcaacggtgaaaatcctcaccccccacctggcacgacctccgtgtgcacatgatccgctagcactaattgga

SEQ ID NO: 89045 - DNA, 260 bp, Glycine max
  Clone ID: 700907050H1
tgatttctccctcttcgctctctctcagtgaccagagacagatgatgctggagatggcgaacgaaacgctgtcgttgcggcactcgcggcgttggttctactcgcggcgagtgtggcggtggatgctcaggagaactcggacgtgaagacgctggtgaagtacaagcacgggaagaagtactgcgacaaggatgggaatgtaagggctggtcaatttactgttgtaacctcaccattaccgattatttccagacctacca

SEQ ID NO: 89046 - DNA, 263 bp, Glycine max
  unsure (1)..(263): unsure at all n locations
  Clone ID: 700907051H1
cttttctctgtctctctttctctttctcttttctctctcaaaacaaaacaaaacttgaattcatacatacatacatctcccttactttgcttcttcatctctctctctctctttctcaatattcaccagcacagcgcatctcanacatcaatcaatcaatgaaatcgtgtttaatgcctttgcttctcctctttctgtgtgtatgtaaaatctttgtttttatcagaggtggtgcagaatgttgtgtctcagatccctatata

SEQ ID NO: 89047 - DNA, 79 bp, Glycine max
  Clone ID: 700907052H1
gcaacttgcaacaaaccatgctactcacgtgtgaccaccatcccttccctcattcactttcttcaacctcaaccgactc

SEQ ID NO: 89048 - DNA, 262 bp, Glycine max
  Clone ID: 700907053H1
gtgtcaatggccgctactatgaaggctttagcttttgttgctttgcttgttaccattaatgcaatagtgtgtgaaagtagagtggcgagaaaggaccttggcttggaccttggtggggtgggaattggggtgggtgctggggttggactaggccttggtggtgggggtggtgctggttctggtgcagggcaggctctggctctggctctggctcttcgtcatattcaagttctggctcctcttcttcttcatcagggtcagg

SEQ ID NO: 89049 - DNA, 264 bp, Glycine max
  Clone ID: 700907054H1
gacagataaagattcaaaaaagaattgatattattcaagttataatatatatgggatttccaaagtttttaatagagggtaagtctcaaaaaatcgaagaattacagacgaatacgcaaaaaaactgaattgtgtgaatcgaaaaccaaacattgctattgtaaaagttgcaaatgcttataagcacccaatattattggagaatttatagctggacaattaaagaatagagtttcgtttcgtaaagcaatgaaaaaagctatt

SEQ ID NO: 89050 - DNA, 264 bp, Glycine max
  Clone ID: 700907055H1
ctcgagcctaagacattgaaagtgcatattgggaacttgtagtgaaggatatccaagatgcctgcagactatttgaaccaatctatgatcaaacagatggtggtgatgggtatgtttctgttgaagtatctcctaggctcgctgatgacactgagggaaccattgaagctgcaaaatggcttcataaagggttgatcgccccaatgtgtatattaagattcctgctacagaggcatgtgtgccttcaattaaggaagttattgc

SEQ ID NO: 89051 - DNA, 257 bp, Glycine max
  Clone ID: 700907056H1
ctaaatctcattcttcacctgcaactatttggattgctgatttttgttaataccatatttactgatattggcgcatttctttgagaaagttactaattcctagatagaggcaaaaatgttgggaattttcaaggagaagttggttaaagcacccaaagagctgaacagtccagcttcgttgaattcatgactaagcctaagctaagtcacgaaatccttcaggatttcatgtcctgcaattcctccaatgctttctc

SEQ ID NO: 89052 - DNA, 262 bp, Glycine max
  Clone ID: 700907057H1
cgaggatccattggagggcaagtctggtgccagcagccgcggtaattccagctccaatagcgtatatttaagttgttgcagttaaaaagctcgtagttggaccttgggttgggtcgatcggtccgcctccggtgtgcaccggtcggctcgtcccttctgccggcgatgcgctcctgtccttaactggccggtcgtgcctccggtgctgttactttgaagaaattagagtgctcaaagcaagcctacgctctgtatacattag

SEQ ID NO: 89053 - DNA, 261 bp, Glycine max
  Clone ID: 700907058H1
gatccgaggagttaccctttcttttcttttttcttttttctctttcctcattctacttaaaactcccaccagtgatggcaggtttggctccagagggaacacaattcgatggtcgccaatatgatgctaagatgagtgaattgctttccactgatgggcaagaactcttcacctcttatgatgaagtgatgacagctttgatgcaatgggattgcaagagaatcttctgcgaggcatatatgcttatggttttgagaggcc

SEQ ID NO: 89054 - DNA, 79 bp, Glycine max
  Clone ID: 700907059H1
cacagcaaaaccctaatttccaactccgatttcgtttctcctccgaaaacaccctaatttccccttcgctcttccacac

SEQ ID NO: 89055 - DNA, 258 bp, Glycine max
  Clone ID: 700907060H1
gggattagattttatcaatatcctcatccctctctcgccctcaattatcattcatataatatcatcatcatatctgtctctagcaatatttcgttatctgcttgtctgcaactctccgtgttggatttcgttttataattgtgcactattatttcaataacccgcagatatttctgattctcaaaaaaaaaaaaaaaaaaaaaaaaaaaaaaaaaaaaaaaaaaaaaaaaaaaaaaaaaaaaaaaaaaagagggaaaa

SEQ ID NO: 89056 - DNA, 83 bp, Glycine max
  Clone ID: 700907061H1
gaaaaaggcgtgtagtaggatgaagttatagtttttcctcctccagagcaaagcatggccctcagcatcctttaccggagtct

SEQ ID NO: 89057 - DNA, 177 bp, Glycine max
  Clone ID: 700907063H1
gttggtcatctgtggatggcatattgcattccaaactcaccatcactccagggttggaagacaggtccatgttgtttattcggctggaacataggcaagaatagagttaatggcaaacctcagattaagtaccatgatattgatcttacattcccaacttctctggtcgacaaaaca

SEQ ID NO: 89058 - DNA, 240 bp, Glycine max
  Clone ID: 700907066H1
ggcttgacaatttcaattttgtttgttatttgcatcaagattcagtttagttaaatgatgtgttggttttcttagttgtagagaaccctgaatagtattattgaaatattacgaattcagtttgatcctggaagggaaatctcgcctaaaaaaaaaaaaaaaaaaaaaaaaaaagggggggcccccaaatgtgaccctttaccccggggtatatattccggaggggtactttggggggaa

SEQ ID NO: 89059 - DNA, 260 bp, Glycine max
  Clone ID: 700907067H1
caattgcacaagggtgatcctgtacctgtgattcttgagattattaatacaatagaaggtggcccaccagttgatgtttcagctgttcgttctatgtatgaacacctggctaaaagtgcacccacaatcttggatgattctctttctgctgattcatatctcaacatcttatacatgccatcaacattccccgttcagagaggtctagacgatcacaagtgtctgcaaataataattctgtgtatagtcgagattttgaa

SEQ ID NO: 89060 - DNA, 260 bp, Glycine max
  Clone ID: 700907068H1
gcatgatatcccgtagtatgttgtctcagcaaggaagctttggaactctgactggtggtggtcttaaggatcctattgtcactctctttggaagtttgcacgagaatactctccctgagagtggaggttcacgcagtatgctacttcataatgccaacagtatctttagccttggagagacgtcgagccctttggtaccagtgacaacctgcatgcgccactaatgtcatttcaagggggtgctggggagaaggataggg

SEQ ID NO: 89061 - DNA, 262 bp, Glycine max
  Clone ID: 700907069H1
tgcctttcctggacattcaactcccattgcacagctttattgttgcggagactccacctttcctggcattggagtcccagcagttgctgccagtggtgctcgttgtagcaaattcattagtctcggtatctcaacattccaagctgctcgatgcaattggcatataaaaccaaggtttcatcttcatgtcccacgttttcacactggaaaagattgaatcttttctacttctcgtgcaaaaactacatcttggtcaataact

SEQ ID NO: 89062 - DNA, 262 bp, Glycine max
  Clone ID: 700907070H1
tctctttgcaactgcatccgttgtttacaatgaaggctactctgaagggaaagtacgacgtcgacaaaaacggcgctgcctttgccaacatcgccgtcaacgccggcgacgtcaagttccgagcctccgtaacggaagccactttcattaacggccccagcctcaccggcttggccctcgctgtcgaaaacccggttccttcatcgtcgactacaacgttcccaaaaaggactttcggtttcactttatgaacacggttagg

SEQ ID NO: 89063 - DNA, 260 bp, Glycine max
  Clone ID: 700907071H1
gctgagcagagaaggagtttaggaagtgtttggttacttctgagattctgctgtctcttagagagcgagcgatgacggtagcagcaggaatgggttacgctctgctagcgttaggaccctctctctccatcttcgtttctgtcatttccaaaaaacccttcctcattctcaccgttctctccagcaactgctgtggcttataagtttgattgtgctgtctggaatatggaggggggttttgcctctcaacacaacagctt

SEQ ID NO: 89064 - DNA, 81 bp, Glycine max
  Clone ID: 700907072H1
gttttcgacttttacttcttttctgggcctagtcctctgaatgttgttgatcagtatacttccttaattggcagaccagct

SEQ ID NO: 89065 - DNA, 260 bp, Glycine max
  Clone ID: 700907074H1
cgtgactcacatgtgcggcgcgccggtggtgctcaacatgttaaccaacgcgaactccccgttggagaaaccggttcagatcctcaccgccggatcgccgcctcctgcggcggtgctcttcagaacagaggctttggggtttgtcgtgagtcacgggtatggtttgactgagaccggagaattggtgtgtcatgcgcgtggaagggggagtggaacaagttgccggcgacggagagcgctcggctgaaggcgaggcaagg

SEQ ID NO: 89066 - DNA, 249 bp, Glycine max
  Clone ID: 700907075H1
aaaaaaatatctgggtttttttgggaatttctcattagaaatgaagatggagaaaagttcgttcctttccatgaacaaaaggcggtccaagagaggtgaaagagaagtgggtgagggacgatgtccaagtcttgcaaagggttggccatggagctagtaaagtgtctcagtgaactgattgtgtaaaggttgagaagagatcatataaggaatgcgttggagagaagagtccatgcataccaagtgagt

SEQ ID NO: 89067 - DNA, 259 bp, Glycine max
  Clone ID: 700907077H1
cggttgtggagccttacaatgctactttgtccgttcaccaactagtggagaatgcagatgagtgcatggttcttgacaatgaagcactctatgacatttgcttcaggaccttaaaactcaccactcctagttttggtgatctgaaccacctgatatctgcaacaatgagtggagtgacctgttgctgaggttccctggacaactgaactccgacctgaggaagctagcagtgaacctgatcccattcccacgtctccac

SEQ ID NO: 89068 - DNA, 147 bp, Glycine max
  Clone ID: 700907081H1
aggcacttctcatgatcattttctgccttcatcaagtgctggaatgttttatgcagtgcctgaaaattatgtacaccagccttctaattctaattatgacagacaagcattttctgctgctgatgggggatttattgatcttacaat

SEQ ID NO: 89069 - DNA, 259 bp, Glycine max
  Clone ID: 700907082H1
gctagaagcaataagatgaaaatgaaagtgcttgttttgtttgttgctacagttttggtagcatatgaatgccatggctcagactaccagaagttccctctccaaatgaaaactgggtttggtgggcaatacagcaatgaggtggcatgtgccagttggaggcttggcgtggaagcaaacaacgtgtcaagtggcaaactgttcctgcagcttgcggagagtacatagctgactacgttctaggagaccaatatagatc

SEQ ID NO: 89070 - DNA, 161 bp, Glycine max
  Clone ID: 700907083H1
tgctacgacgccgttctgtgtattatccttccccttccccggtcagccgtgttgttttgttcggaatctgaaatcggaaattggaagcagaagaatagtcttcagagaagggtaaaatcgatgagtaggaacgattccaagtacttctccacacaacatac

SEQ ID NO: 89071 - DNA, 263 bp, Glycine max
  Clone ID: 700906357H1
attgaaagatagaaattgatatctgtgaaaaatgacactagaataacaaccttagtaattaaatatgtaaggctgttttatggagaggaagatttccttgtttttgtgtatagagattagagggagttcaagttgtggttaatattcttgtatatttgtagatgcatgatacttttaatttcgagatgtttaatttctatcagctaatctcatctctttatcatctgtaacatgttattattccttcctcctttaacttgtgg

SEQ ID NO: 89072 - DNA, 265 bp, Glycine max
  Clone ID: 700906358H1
cttcccttcgcctcttcttgttcttcttcttcttcaatatttcggagcaactctacatatctttagcctcctcttatatatttcggaagttggtttctgctggaaattttgcaaacaaattcatatactgaaaggactttatgactagggagttctatacaatcagattcgcaatggatctgagcactattgaattggcgaagggctaatgaagcttaatggtttattcacagggagcacgagaagctccagagaactctttaca

SEQ ID NO: 89073 - DNA, 267 bp, Glycine max
  Clone ID: 700906359H1
aaacaaagaaaaaaaaaaacccttagccaacacaaccatcatggccacctctgctattcagcaatcagcattcactggtcaaactgctctgaagcagctcaatgagttcgtccgcaagaccggtggcgccggcaaaggtcgcactaacatgcgctgcaccgtcaagagtgctcctcagagcatttggtatggccctgaccgtcccaagtacttgggtccattctcggagcagattccatcatacctgaccggagaattccctggtga

SEQ ID NO: 89074 - DNA, 262 bp, Glycine max
  Clone ID: 700906362H1
attaattgcaagaatggcacttcgttgcttggtgatgtccctttctgttctcttcactcttggtcttgcgagagaaagccatgccagagacgaagatttttggcatgctgtttggccaaacactcccattccaagttcattgcgagatcttctaaagcctggccctgcaagtgttgaaatcgatgatcaccctatgcaaattgaagaaacacagtacccgaaaaccttcttctataaagaagaccttcatccaggcaaaaca

SEQ ID NO: 89075 - DNA, 272 bp, Glycine max
  Clone ID: 700906367H1
cacagttagtacaaaaaagggttacttcatgctccacatatcttgaagaattgatcaatgggcaagtctgtagttgagaagctactttggatggcaattgtgtgcttggtgctgggtgtaatttccattactcccaaggcccaagcagcagtgacatgcaaccaggtggtgagcaacctcaccccatgcatttcttatgtgctcaatggtggcaaaaccgtgcctggcccttgctgcaatgggatcaagaccctctttaacctcgctcactc

SEQ ID NO: 89076 - DNA, 272 bp, Glycine max
  Clone ID: 700906368H1
cttctttcctcttagcttcgcttgcacttttgttttgcatctcctccttggagaagagctttgcctttcaagcaacaaaggaaagcaacaatcttcgtcaatatcattttgttcacctcaactctctatttccatcatcttcttgcagctcttctgccaaaggtcctaaaaggaaagcatcattagaagtggtgcacaaacatggcccatgctcccaactaaatcatagtggcaaagcagaggctacaatatcacacaatgatattatgaac

SEQ ID NO: 89077 - DNA, 268 bp, Glycine max
  Clone ID: 700906369H1
acaaaattgagatattgcaagtgaaatgaaggccaggcacatctcattcttctcttgatatttctgatggcactcgctgcaaacaaagtttctagcagtcctattgtgactaaaagaacagctctttgcagatcacatgaaaaacactatttttcctcgtcaacaaggatcaatagaatacagttgtcaagacatagactggaacatggacatctgaactatagatgtctccacacacagagatcaaccttattcaatgactggtttt

SEQ ID NO: 89078 - DNA, 263 bp, Glycine max
  Clone ID: 700906370H1
ctctttctctctctctctactccaactccttgatgccaattttagcatcagcgttgttgcctccattcttcttcttctcttaatgggttgcatttactcgcgagtctgcataggcgacaattgcagaggctcaagcatcaacggagaccccattatcgcccgaaacgacgtcgccgaagtcgcgaatttctccccttcctcttcggatgttgaagaaggcgaaatcagagaccaattgaaccaattgagcatcactcgagact

SEQ ID NO: 89079 - DNA, 265 bp, Glycine max
  Clone ID: 700906371H1
gtttcaatcgaaaccaaaacaaaaacatgggcagaaaattcttcgtcggtggcaactggaaatgcaatgggaccactgaggaggtaaagaagattgttactactttgaatgaggctaaagtccctggagaagatgtcgtagaagttgttgtgagccctccttttgtgttccttcctgttgtaaaaagtttgctgcgccctgatttccatgtttcggcacaaaactgttgggttcgcaaaggtggtgcttataccggtgaggttag

SEQ ID NO: 89080 - DNA, 86 bp, Glycine max
  Clone ID: 700906372H1
aatcatcaatgagaatgcttgtctctttgttcaaaagaaacaaaaaaaaacaaccaaaagaaaaaaaggggggggccccccgtttt

SEQ ID NO: 89081 - DNA, 262 bp, Glycine max
  Clone ID: 700906373H1
gagataagtttggggaaacttgcatttgacattgattttcatccctcagataatcttgttgccgccggtctaattaccggccaccttcacctatacctttatagccctcatactgtccctgtgaggctgttggaagttcatgctcacactgagtcttgcagggctgctcgattcatcaacggtggacgtgcactcttaacgggttctccggattgctcaatactggctatagatgtggaaactggttctacaattgcccggg

SEQ ID NO: 89082 - DNA, 259 bp, Glycine max
  Clone ID: 700906374H1
gcgaaatcaggaagcggcggtggtggaatagaggtagccgcaactggcaaagaaagttgcgctctcactgtagtgcaatctctgaacgaggactccatggggctaccattgaagctttcaagcccatccatcactacgtctcacttcaccgaatacgcttcgttgagcatcgagttcacttcggcgccggcgccgtgttcgtccgcttcggagtggaccgttgtcaagggattacccgaaggacgcgccgttaaactta

SEQ ID NO: 89083 - DNA, 261 bp, Glycine max
  Clone ID: 700906375H1
tgtttttctacttgtttttggacttgatatatttaattttttagaatgccttcattttggcttatgttcttttggatatctttgatgaacttctcatacaaatgctgctccattaattaagtattgtttaactcccattggtttcaaacatctacttgatgaattaccctctcctcattgataagaactttgggagaagctcaccacaaaagctagacatagctatagaattgactgtggccttataaaccccttactaga

SEQ ID NO: 89084 - DNA, 264 bp, Glycine max
  Clone ID: 700906376H1
ggagctctgccacagactctagaaagcagagaaaacgatgatgggcttacatggttgtactctcaaactcgcttcagttcccaatttctcttctccaactttccttttcaaaactccaaccctccgttttcagaaatctccattgtcacgccccatcagagctctatcttcctccgccctcgtccaaacatctactaccaaggccactgaagaccaaggtgtgaagcctcaatggaaggccacgatagacttcaagtggataaa

SEQ ID NO: 89085 - DNA, 261 bp, Glycine max
  Clone ID: 700906377H1
aaagcaaggaagagaaagaaatttgtttctctctaaagagtctccgctgaactttttggtttcttgaagatgtcgttactctccgatcttatcaaccttaacctctccgacatcaccgataaggtgatcgccgagtacatatgggttggtggatctggcatggatatgaggagcaaagcaaggactctctcgggactggttaatgacccttccaagcttcccaagtggaactatgatggttccagcactggtcaagctcct

SEQ ID NO: 89086 - DNA, 259 bp, Glycine max
  Clone ID: 700906378H1
gtttgctgaagagcttgaacttgaaactcttccaccctcttaccctccccctcaccctgttcactcccccgcaccagcacctcttcacgcaccagcaaatgctcctgccccacaccaacagcagcaccagcaccaccctccagcaccagcaccagcacgagcacctgttccttcaccttctgaccacaattaccctcctacccctgctgctgctaagcctcctagtcaccaccatcagcatcaccctcctgctcctgtt

SEQ ID NO: 89087 - DNA, 261 bp, Glycine max
  Clone ID: 700906379H1
ctcactcgcaagcaaaaagaaagaatcccaggcgaggagaaagatggaggggaaggagcaggatgtgtcgttgggagcgaacaagttccccgagagacagccgattgggacggcggcgcagagccaagacgacggcaaggactaccaggagccggcgccggcgccgctggttgacccgacggagtttacgtcatggtcgttttacagagcagggatagcagagtttgtggccacttttctgtttctctacatcaccgtctt

SEQ ID NO: 89088 - DNA, 263 bp, Glycine max
  Clone ID: 700906381H1
tagtctaagagaaaggctgttgccaagtcacctgtcaatgctagcggcaacgtatagcgattccctcatatatctaagttcacgtctacgatatatctctccctctaattaaacctctctatccatatctaaaatttcacaatgatctcaattaattagatttccctctctctttctctctctaactatattgcaaacctttctctctgctttcataatcagcaatttcatgggtcttagagacattggtgcttcactgcccc

SEQ ID NO: 89089 - DNA, 265 bp, Glycine max
  Clone ID: 700906382H1
gccctgacaccgccttgctaatcccatcctccctctttctctctcgacattgtaataggaatcaatttccaaccatgacggactactgtcaagcacaggatatggagattgaagcattagaagctatactcatggatgagttcaaagaaatacactctggtgaaagtggcctaagtacttccaatcggtgcttccaaataaaggtcgttgcgcaggatgacgatgaagatgggccaatacataatccagcacaactggctttgat

SEQ ID NO: 89090 - DNA, 197 bp, Glycine max
  unsure (1)..(197): unsure at all n locations
  Clone ID: 700906383H1
ataaataatatgatcattgatcatcacatcgtaccacaagatattataatgtcttctcttccttantgtttcttttttttgnnttactancacaattacgatgacaattaggaaaccgtcgacgatgatgaggacgatgacgacgatgacaaggaagatgacgcccaaggtggtgctgagggtgggacgcagagcag

SEQ ID NO: 89091 - DNA, 261 bp, Glycine max
  unsure (1)..(261): unsure at all n locations
  Clone ID: 700906384H1
cttcccctatggcttctcactccttgctcttagccctcctcctcatccgcggcgtggcaccgcgcgatggggtggcgcgtccgacgccgacgacatcctgatccgtcaggtggtgccagatgttggcgaaccgnaacaggaggacaacctgctgaacgccgagcaccacttcgcgagcttcaaggacaagttcgccaagacctacgccaccaaggaggagcacgatcatcgcttcggcgtcttcaagtccaacctccgcag

SEQ ID NO: 89092 - DNA, 214 bp, Glycine max
  Clone ID: 700906385H1
cagcaatcaaatctgtaacctttcagaactccggaccccctttgaaatttcaacatgaccggctatcccagccagcctccgagctacagctacagcgcgccatggctgaagcaagtctaaagtgtccctacggcatcgcaatcatatggggactatccgccatcgtaataatacgtggctcatccgacaccacgacgctacggagcggtgacta

SEQ ID NO: 89093 - DNA, 259 bp, Glycine max
  Clone ID: 700906386H1
aagaatacttgttcggaaaaattgacatgcagctcaagctcgtgcctggtaactctgctggaacagtcactgcctattatttatcttctctggggcctactcatgacgaaatagacttcgagtttttgggtaacttgagtggtgatccttatactctccacacgaacgtattcagccaagggaaagggaacagagaacaacagttccatctatggttcgaccccaccaaggacttccacacatactccgtcccatggaa

SEQ ID NO: 89094 - DNA, 263 bp, Glycine max
  Clone ID: 700906387H1
accgatcttaacctctgagaagacgtgtcggtagctgaagcattttataagcctccactttcctgaactagttttaacatacaatctttcaagtacacctccccagcttccatttaagaatggagatcactagaataggccaatggttaagtcttctgatatgtgtactactattactgcagacagaaggggttcctgtgggaatcacttttgttgaaaatgcagtggcaaaaggggctgtttgtttggatgggagtcctcca

SEQ ID NO: 89095 - DNA, 260 bp, Glycine max
  Clone ID: 700906392H1
cctctctctttctctgtgtctagggttttaggagttcgaagcatcatcatgtcttcggtggaccccgagatcgcgaagacgcaggaagagcggaagcggatggagcagcaactggcgtcgctcacctccgtcacgtttgataccgatctctacggcggaagcgacaagggctcctacctcacttccatccctgccaacgaagacgacgagaatctcgacgccatggacaacgaggtcgcgcgcaagctggcttcttacac

SEQ ID NO: 89096 - DNA, 258 bp, Glycine max
  Clone ID: 700906394H1
gataataatgccaaagaaagaagtcagaaaatgtcctttttcaactggtggaacagtggtttgtgtagtggaatcattctaggagtgactgtgattgtgtatgttcaagaccatgtcaattggggggttgctgatatcgtcctcacaggggtcatggctgtctcattgctcatattcttgattggaaggtcttcttatcgttacaggacaccaattgggagccccttgactcctatgttgcaagttattgttgctgct

SEQ ID NO: 89097 - DNA, 276 bp, Glycine max
  Clone ID: 700906401H1
attatgaagaaagtgcaagaagaaattagaggcttaagtggtacgaaagatttcttggatgaagatgatattcaaaagttttcctacttaagggcagtgataaaagagacacttagattgcacttaccagcaccactacttataccaagagaaacaaataaaaaatgcatgttagatggctcacgaaattccagccaagacattattatatgtgaatgcttgggcaattcatagagatcctaaggcttggaaagatccagaagagtttatacctga

SEQ ID NO: 89098 - DNA, 263 bp, Glycine max
  Clone ID: 700906402H1
cggcgggagtaactatgactctcttaaggtagccaaatgcctcgtcatctaattagtgacgcgcatgaatggattaacgagattcccactgtccctgtctactatccagcgaaaccacagccaagggaacgggcttggcggaatcagcggggaaagaagaccctgttgagcacaactctagtccgactttgtgaaataacttgagaggtgtaggataagtgggagctggaaacagcgaaagtgaaataccactacttttaacg

SEQ ID NO: 89099 - DNA, 261 bp, Glycine max
  Clone ID: 700906403H1
ctttgctattatctcttcccttgtccttcttcctactatactaagttttctctctctaatcaatcatagttctgatcttcatacacttaccccggaaacctccatttctcagatcaagcttgcacgaagacattaaaaaatagaaatacatacatagctatggacaataatacttgtgcctcctcccaacttgagtcagaagaagcatcttttgagcacaaatcagagactccaacatcaaagtaaaggaaaatggttgag

SEQ ID NO: 89100 - DNA, 264 bp, Glycine max
  Clone ID: 700906404H1
gcgttgtgaaaatattgatggattccttgctggtgtcatgagtaaaaagtcgctgtctactgatgctcatttatcaagatcatcaaaattggaggacaaggacaaagagcacaagcgcgatatggatggagctaaagagaaggaaagatacagggagaaatacatgggaaaatcaattcaagaacttgaccttagtgactgtaaacgttgcactcccagctaccgacttctgcctgcagattatccaattcctacagctagtca

SEQ ID NO: 89101 - DNA, 257 bp, Glycine max
  Clone ID: 700906405H1
cgccaacggcgacattccgagtctcgccgccgatcccaacgcggccactcagtgggtgaacgcgaacgtcttgccctactacccggcgagcaacatcactctcatcaccgtcggaaacgagattttgaccttagccgaccagggtctactgtctcaactcgttccggcgatgcgagatgtccataatgccctcggcgcggcctcgctcggtggctagatcagggtctcgacggtgcactcgatagccgtgttgactc

SEQ ID NO: 89102 - DNA, 270 bp, Glycine max
  Clone ID: 700906406H1
catcctacgccaatagcccaaaaccttgttctctttttgtggttcatttctctcttccagatgccacttgccggtcttcaccctcacgattttctcaggaaaaacccatctaaccagtaccagaccataatccctcactctcccaacatgaatcctaataagtctcatcggacttcccgaaaccgtaagatgcggcccgatccaagcccacaaggcgttgtcagcccagcccggctcacattatccccgaaaccccaagttataaacaag

SEQ ID NO: 89103 - DNA, 173 bp, Glycine max
  Clone ID: 700906407H1
taaaaaaatagaagcagaaagaagtgcctctgtctctttctctctctacaagccttcttcttcttcttcactttgattttccgtcttcaatgcaaacccaaccatgatcctctacacgtaatcccaccttacctaagctaaaacccttttgatctcactgttccacacaacat

SEQ ID NO: 89104 - DNA, 265 bp, Glycine max
  Clone ID: 700906409H1
attggatcgagggtaccagatgagactgcttaacgcaacctcgtgtttcgttcttctctggtgactggtgagtgcggcgacgctggcctgcagtggtgcgacttttcaccgacgacgctcgtcgtgcaagcagctaagtaccacgacgctcttgtgcgagcagcttctagtcgctggacggatggtggttctacgattaagtactagggttcagacttcatgcctcttaaacaccgtgtataactgattttggtggtgattccaa

SEQ ID NO: 89105 - DNA, 270 bp, Glycine max
  Clone ID: 700906410H1
atgctcaagcaagggataacttggagcgtgttcttgagtgcctagaccaggagaagtgtgaaacttttgaagattgtatcacttgggctcggctaaagtttgaggattattttgttaaccgggtgaagcagttgatctatacttttcctgaagatgctgcaactagtactggagctcctttctggtctgcaccaaaaagattccctcgtccactacaattctcagcctctgatttgggtcatctaaattttgtgtcgtcagcttctattt

SEQ ID NO: 89106 - DNA, 269 bp, Glycine max
  Clone ID: 700906412H1
gaaaccctagctagccacaatgcagatattcgtgaaaaccctaacggggaagacgataaccctagaggtagagtcttcggacacgatcgacaatgtgaaggcgaagatccaggacaaggagggcatcccgccggatcagcagcgcctgatcttcgccggaaagcagctggaggacgggcgcacccttgccgactacaacatccagaaggagtccaccctccacctcgtcctccgcctccgcggcggcgccaagaagcgcaagaagaaga

SEQ ID NO: 89107 - DNA, 267 bp, Glycine max
  Clone ID: 700906413H1
agctcatggagattactgctttcttcaaataactagaagtggtattggtgcttatgatgatgatggacatgtcactaggactgggtatttgcagaatgctgtagctcatatcattactgctgttattggttctggtgttctttctcttgcatggagcacttcccaattaggatggattggagggccattttccttgccttgttgtgcaattgtcacctatatgtcttcattcctcctgactgactgctacagaactcctgatcctgt

SEQ ID NO: 89108 - DNA, 266 bp, Glycine max
  Clone ID: 700906414H1
gaatatcaattgggcaaagcggactaaatgcaatatctgcaacacaaataagcctgggcataatgagggtggtgtaagaggaggacgaggtggaggttacaaagagcttgatgaagaggaaatagaagaaactagacgtcgtaggagggaagctgaagatgatggggagttgtatgatgaatttggaaatctaaagaaaaaattccgtgccaaaacacagcaagctgaagctgcacgtgggcttcctggttcagggcgtgctggtt

SEQ ID NO: 89109 - DNA, 276 bp, Glycine max
  Clone ID: 700906415H1
tcactcgagcgctagaagctagttaaactgagagtccaatactcaaatcatgccaaagtaattgatcttatttgtttccatttcccttgagattgatttgaatgtttgatgcataaagcaatgggactttcatatatcaaaatgttttgacttctatccattttaactcatgtgaattgaagtaacattttcctgttgtagcttaagatgaatatatctcatgcagatagtatctattacactacctggttctaacactcatctaataaaaatctg

SEQ ID NO: 89110 - DNA, 275 bp, Glycine max
  Clone ID: 700906416H1
ctctaattctcttagccattattgttatgatttcaataccatcaagccactgcagtatattgcttccagaaaatgaaaagcttatagagaacacttgcaggaagacccccaactacaacgtttgcctttagtctctgaaggcaagccctgggagctccagtgctgacgtcacagggctagctcaaatcatggtgaaagagatgaaggcaaaagcaaactatgcattgaagagaatccaggagctgcagagggtgggagcagggcctaataagcaa

SEQ ID NO: 89111 - DNA, 271 bp, Glycine max
  Clone ID: 700906417H1
acacattctcctaaatccatggcaacccttcttgtccagcaccagtttcaagccaccgaagaaggacaagatgagtgatcatggtcgtgcaaaggcagcatctggttcaaggaatcgtttggaatccaagaatattgtcaatagaacttcctcctttaattacagaagcagctctgctgttccccttcatgagttgccatgggcttcctttgatcaatatatagaggacaagggaagagtaatccgatctatatttccagaaaaatcaaca

SEQ ID NO: 89112 - DNA, 254 bp, Glycine max
  Clone ID: 700906420H1
cctcaatacccacgcaacacaaagttccctctactctctttcccataatttttcactatcattccttcccactcgctctttcttcgacgctcttcctcctcattgctcatgtcctccacgacgtcgttttctctctctcacgctgttgttcccttctcctgcaacacaaagcatggtcatttatctcacaaccgccactatctctccctcccaaaacccatttccctgaagcccctccgatcgccttccttcaa

SEQ ID NO: 89113 - DNA, 267 bp, Glycine max
  Clone ID: 700906421H1
cggcttggtccctctcgtgggtgagaactacgccctcaagctgaaaaattccatgcaagaccttttggccgagattcctaaagaatccccaaatttttctcctttcgtcgatgcgttttacgaattgatgcaagcgaaggttgattcatcctttgaggtgatatgggtctacgctgcaattaactttcgtggtcgtaactcggagaaaggtgatgccttggatcgaatattggccgcaaaagacttgtttaagttgctatctgcgtg

SEQ ID NO: 89114 - DNA, 265 bp, Glycine max
  Clone ID: 700906422H1
agagaaaccaaaaatctcaacaaagcagtttctaagatccgatccattcagaccattccacattatgggggagctagagagagactctcttacaccctagggtttctctcgcgaaatgtgcccgatcgagacctaaggcttgttaggtgtcccaatttccgtgctgcattagtcccaagcgtgagggcgaatcctggtgcaacggtacagttgtgccttggtgacttgttggtcatgggttcgaatccggatacagctccttgca

SEQ ID NO: 89115 - DNA, 266 bp, Glycine max
  Clone ID: 700906427H1
attatcatttgaaaatttacaaagcatgaataatttttagctttttccttttaacaatgtatatggtcgatcaactgatactttgttaaaaggactaagctcaaaattattcagaatcaagctagagcagagacatttttcaggatcagacaagggattaggcttttttcatattcaaactaagtagagcaggattcgatcatagtgtacatgatgtgggtattgcattagtcattagtgcatgctgtgaaatatattctttgagg

SEQ ID NO: 89116 - DNA, 265 bp, Glycine max
  Clone ID: 700906428H1
ctttgaaacccaacccaatttcaccgttgctagctcttgtttattttttgtcggagaaaataataataacaatatataatgtcggttgaggagatgcagtcacagaagaggaatgtgtttgacgcagaaacggcgtcgtccttggtgaaggagctgagggacaacttcggttcgggaaggactcggagttatgaatggagagtgtcacaagtgaaggctctgttgaaggcggtggttgataacgaggaacagatcgtcgacgctc

SEQ ID NO: 89117 - DNA, 267 bp, Glycine max
  Clone ID: 700906429H1
attttcctttgtttgacttgattccttttctgggttgttgtcaaaatttgagcttgttcgtggacgatctggttttcgatcgatatcctgttttgtttactttttccttgtggggttgcttcacaatgaaaaaaacttaatcatagtttagggttttcttttttagaaaaaaaaatattgttggctaggaattggagatttaatgttttactcctcattaaaagtgagtataagttacatataaaacttcaattctaattaaatggt

SEQ ID NO: 89118 - DNA, 271 bp, Glycine max
  Clone ID: 700906430H1
aattagttcattctctttgcgcagttccctacctctcctttcaagatgcagatcttcgtcaagaccctcaccggaaagaccatcacccttgaggtggaaagctctgacaccatcgacaacgtcaaggccaagatccaggacaaggaaggaattcccccggatcagcaacgtctcatcttcgccggaaagcagctcgaggacggccgtaccctcgccgactacaacatccagaaggagtcaacccttcaccttgtccttcgtctccgtggtg

SEQ ID NO: 89119 - DNA, 271 bp, Glycine max
  Clone ID: 700906431H1
cgggcttcacaacaatgaaaggcttccaatccgatttatcctccgccgttcgcctcaacattggaggcaagaaattttgcaccaccaccgatactctcactcagcgcgaacccgattcaatgcttgccgctatgttcagtggccgccacacgctgtgccaagatcctgacaaggggtatgtgtttgttgatagggatggtaaacactttcggcacattctcaattggttaagggatggtgtggtgcctactctcgaggagtctcagtactc

SEQ ID NO: 89120 - DNA, 282 bp, Glycine max
  Clone ID: 700906433H1
attatgaagaaagtgcaagaagaaattagaggcttaagtggtaagaaagatttcttggatgaagatgatattcaaaagttttcctacttaagggcagtgataaaagagacacttagattgcacttaccagcaccactacttataccaagagaaacaaataaaaaatgcatgttagatggctacgaaattccagccaagacattattatatgtgaatgcttgggcaattcatagagatcctaaggcttggaaagatccagaagagtttatacctgagaggttt

SEQ ID NO: 89121 - DNA, 282 bp, Glycine max
  Clone ID: 700906435H1
ctcgagctctacgaaccccgcggactacaagcttctagaagaagttggttatggagccaccggcaccgtctacagagcgatctatctccccttcaaccaactggtggccatcaagtcctttaatctcgatcgctgcaacgtcaatctcgacgacctgcgcagggaggcccaaaccatgagcctcatcgaccaccccaacgtggtgagggcgctctgcttcttcgccgtggaccggagcctctgggtggtcatgcccttcatggaccagggctcctgcctcca

SEQ ID NO: 89122 - DNA, 264 bp, Glycine max
  Clone ID: 700906437H1
cagctattgaggaaatggcagggatggatgtcctatgcagtgacaaaactgggactctcaccttaaataagttgagtgttgacaggaacttgattgaggtgtttgctaagggtgttgagaaagagtatgttatccttcttgcagcaagagcttctaggactgaaaatcaagatgccatagatgctgcaattgttggcatgcttgctgacccaaaggaggcacgtagtggtgttagggaggtacatttccttccattcaatcctg

SEQ ID NO: 89123 - DNA, 262 bp, Glycine max
  Clone ID: 700906438H1
cttttcagctttcattggtgtggcctagctgttttctcaatgactaagccttcatctctgcaaagcgcacttttgcgtcttggggttcccttgttgcttgttatcaccttctgttatgctacttctactgctgctgcaacaactcaagtttcagggaatgaagagctgccaaagacaaacctaaatgggcagtctgaagaagcaaaattcggattttttcatcatagaccaatattcaagagacatattccaattccagtat

SEQ ID NO: 89124 - DNA, 262 bp, Glycine max
  Clone ID: 700906439H1
ctttatttacaacaacaatggcttctgtgcctcaaccaaaaatctcccttctaaccttattcttcttctcgtccttcaccatcattgcgcatgcaattgttcctcaaaacgaaaccttcaaatttgagaactcaggtgaacttggaccctacatcgttgagtacggtgcagatacaagaatgataagcatcttcaactctccattccaagttggtttctacaacaccaccccaaatgccttcactctagctttgcgtgtagg

SEQ ID NO: 89125 - DNA, 258 bp, Glycine max
  Clone ID: 700906440H1
attttcccaaaaatgagaaatatttgcctttgtttaccgccggtgatgattcggagatagttgacaggagaaatgggctgcgcaaacagattgaagataggttgattgcagctgctgcaagtggcaaggatttagaagagactggcagtgaggatgatggtcttttggatctgagtgatgatgattttttccttgctgggagttctagtgacgaagcagatgcggatgatgaatggacagacaaaagtgcaagagagc

SEQ ID NO: 89126 - DNA, 264 bp, Glycine max
  Clone ID: 700906441H1
cagataatgagtataattccaaagacagctctgtgtagttggtttatgaaccccagccacgtcctcgagcaattgctgctcttgctggggaagcaattgtcaaagtggcatgtggaacaaatcatacagtggcggtggataagaatggcttcgtctacacgtggggttttggtggttatggaaggctaggacatcgggagcagaaggatgagtgggtcgcacgacgtgttgaaagttttccaaaatagaaatgttttgccaccc

SEQ ID NO: 89127 - DNA, 263 bp, Glycine max
  Clone ID: 700906443H1
caccaccgcaatgtttgcattatacctgtctcagcacacggaacaaatcctgctagtgcagctatgtgtggaatgaaaattgtctctgttggaactgatgccaagggaaacattaatatagaagagctgaggaaggctgctgaaacacacaaggataacttatctgcacttatggtaacatatccttcaacccacggtgtttatgaggaaggtattgacgaaatttgcaatattattcatgataatggaggccaagtatatat

SEQ ID NO: 89128 - DNA, 261 bp, Glycine max
  Clone ID: 700906444H1
cgcggcttcaaccttgtagttattctctttcttcttttttagctatccctctcttgaaaaatctagatctcgttcttcctgatctacgttacgcttttagtgaccggatctgtatggatctgaaccagatctacacgccgatggtggttttggcctggtctttcatagatctgatgcatggaggctcagatctactgtacagaggtgtgcgattcatgttcgtctctcttttggaatctgtttcgtagaaagtcgtttggt

SEQ ID NO: 89129 - DNA, 264 bp, Glycine max
  Clone ID: 700906445H1
taggcgcttcacaagatcctagagtctgagatcaaaggagactttgagaaagccgtgtaccgatggatactggaacctgcagatcgtgatgctgttttggccaatgttgccatcaagagtggcaaaaactacaatgtcatagtcgcaatttccacaatgacattgtagaaattgccactatcctctccccggaagagcttttggcggttagacgcgcctatctcaaccgctacaagcactccttggaagaagatgttgcagctc

SEQ ID NO: 89130 - DNA, 265 bp, Glycine max
  Clone ID: 700906446H1
gttaccctttcttttcttttttcttttttctctttcctcattctacttaaaactcccaccagtgatggcaggtttggctccagagggaacacaattcgatggtcgccaatatgatgctaagatgagtgaattgctttccactgatgggcaagatttcttcacctcttatgatgaagtgtatgacagctttgatgcaatgggattgcaagagaatcttctgcgaggcatatatgcttatggttttgagaggccttctgctatacag

SEQ ID NO: 89131 - DNA, 267 bp, Glycine max
  Clone ID: 700906447H1
catacctctataataacaaaacaacacttggagactaacttgggtgggctcaccgttgagcaggctatccagagcaagaagttgttcatcttagatcaccatgactatctcattccatatttgaggaaaataaatgcaactaccacaaagacttacgctcaaagaaccatatttttcttgaaaagtgatggaaccttgacgccattggccattgagttaagtaagccgcatcctcagggtgaaggatatggtcctgttagcgaatct

SEQ ID NO: 89132 - DNA, 275 bp, Glycine max
  Clone ID: 700906450H1
ctcttcctcaccgattgctagaatggaatttcgatgctcagtcatctcttttaccattctcttctctcttgctcttgcaggagagagccatgtccatgcatcgctacctgaggaagattattgggaagctgtttggccaaacactcccattcccactgcactgcgagagcttctaaagcctctccctgcaggtgttgctatcgatgaactccctaagcaaattgatgatacacagtacccaaaaacattcttctataaagaagaccttcatccag

SEQ ID NO: 89133 - DNA, 275 bp, Glycine max
  Clone ID: 700906451H1
ctgaaacaaagaagtgaaaataacagcaaaaagtagcagctgctgcagctcccccgaagcttatctcagcagcagatactcaaccctgtttgagtagacgagaataacaccaatgggagaggaggaaaagaaaccagaggaacaacccaaggcagaggagaaaaaaccagaggaagagaagaagaaagaagaagcagcagcagcggaaaaaccaagcgaagagaaaaaaccggaacaagagtcgaaagaggaagttgctgctccgccaccgccac

SEQ ID NO: 89134 - DNA, 97 bp, Glycine max
  Clone ID: 700906452H1
atcaaaactggtcccaaggagccagaaacaccaaagccaaaaacacttcctttgttacacatgatgaaaacagtttctcttgtccacagaacatacg

SEQ ID NO: 89135 - DNA, 260 bp, Glycine max
  Clone ID: 700906454H1
cgatatcactatcaggcattttggaagttaagccagtggacattactcacacagaccaaataaaggaataccaacatggcacattggtctcagcaaacagcattggtgtttaccatgaccatttctacatattccatcttgattttgacattgatggtgtggaaaattcctttgtgaagaccagtctcaagactctacaagtcacagacaacagttccaagagaaagagctattggacaactagtaatgaagttgttaag

SEQ ID NO: 89136 - DNA, 92 bp, Glycine max
  Clone ID: 700906455H1
ctaaactgtaaaacacacgctctctctttcgcctgaaattttcgtcttccttttcgttttctcagtctattgctcttccacacaacatacga

SEQ ID NO: 89137 - DNA, 223 bp, Glycine max
  Clone ID: 700906457H1
acttatccctttccatccaccaaaccaatatatctaaaatctcacaaacaccacctccattggcgctatcacgctacgccgtcgtttagcacctccttctccacccttcgtctctcaatccacacatcctcttatccataatgtccttctctccctctcgtttttcgccaaatttgtcttctttttgcaccttctccctgatttttcctcgcctcaaataata

SEQ ID NO: 89138 - DNA, 265 bp, Glycine max
  unsure (1)..(265): unsure at all n locations
  Clone ID: 700906458H1
ctgtgaaacctcccataaacctaaaaccctaattctcaacaaccatgagctacgagaaccctagcttccacttcaagacacacagacaagagactcaatgcaatcctacgatctccttccaccaccttcccttctgtcaacgtgcctctccctccctcttccaccacgcgccgttctacaancaccaccctccgttccccccaacccaccaacgccctcatcgaccctaatccctctctccgcataacgacgccgacgacgacga

SEQ ID NO: 89139 - DNA, 262 bp, Glycine max
  Clone ID: 700906459H1
atgatcatatattcattcagttctatacaaaatcctcaaaaactcttcctctctgccatgaccatggaatacagaaccttagaactcaacatcatatccgcaaaggacatcaagaatgttaatctcttctccaagatggacgtatacgccgccgtttcgctctccggtgaccctctccaccctcagggcgccaccacccacgtccacaaagacgccggcagcaaccccacgtggaactaccccgtgaaattctctgtcaacg

SEQ ID NO: 89140 - DNA, 261 bp, Glycine max
  Clone ID: 700906460H1
tgaaagtgagtatgctgcctggaccctagtcaacgggtatgcactaaaccatgttattatatccactcatcggctgaaaactcatttgaaggagataaaaaaactaaatcagtttattaaggatagtggattcagattgaattctgaaggaggagtgctgaaagtgagccctgatggtcttctccagcaaagctcaactgtagcagattcaatttctttcaaattttctgatggtataactgaatcagttccatgctcata

SEQ ID NO: 89141 - DNA, 263 bp, Glycine max
  Clone ID: 700906461H1
atttcaaagagagagagagagatttcacagaccaaattgcagaggacgacaaagttcacaacttcaaggaaaatcgaaatggcccaagtgagcagagtgcacaatcttgctcaaagcactcaaattttcggtcattcttccaatcccaacaaacccaaatcggcgaattcggtttcattgaggccacgcctttggggtccctcaaaatctcgcatcttggtgaacaaaactggaagccttatgggaaattttaatgcggggaa

SEQ ID NO: 89142 - DNA, 263 bp, Glycine max
  Clone ID: 700906462H1
tctgagttctctcatttctcgtcttcactgagaaaaatccttctttgtgcatgctcctcgtttccatctaaaggggagagggggtgagtgagaaaaagtgagtgaggtttctagcttctactgttgagtaaacatgactatggaagagggcagggtagagaacgaggactacacacaagatggaactgtgaacattaaagggaaacctattcttagatccaaaagtggtggttggaaagcttgctcctttgttgttgtatatg

SEQ ID NO: 89143 - DNA, 251 bp, Glycine max
  Clone ID: 700906464H1
agagaagaagcaagatggcgtcatctcgtccccctccttcgaaatccgtggatctggacctaacaatcgtgtcggcgaacacctgaagaacgtgaactggaagaacggcgatctgaaaccctatgtggttttctgggtggaccccgagcggcgcctggtcacgaaatccgacgactccggcaacacctcccccgtctggaacgagcgtttcgccctccctctccctttccccctccacgactccttcctca

SEQ ID NO: 89144 - DNA, 100 bp, Glycine max
  Clone ID: 700906465H1
gtcacaaggacgcaacggtaaatgccgcctcacatcaaaaccagcacctctaaccgtagcataaaaccaccaccggagacaataccaggtcccccttcct

SEQ ID NO: 89145 - DNA, 272 bp, Glycine max
  Clone ID: 700906466H1
acttttcagctttcattggtgtggcctagctgttttctcaatgactaagccttcatctctgcaaagcgcacttttgcgctttggggttcccttgttgcttgttatcaccttctgttatgctacttctactgctgcagcaacaactcaagtttcagggaatgaagagctgccaaagacaaatataaatgggcatgatgaagaagcaaaattcggattttttcatcataaaccaatattcaagaaacatattccaattccagtatataaacctg

SEQ ID NO: 89146 - DNA, 104 bp, Glycine max
  Clone ID: 700906467H1
ggagcgatctgaggtgaggacattaaaagagcaatgctagcacagggattcgaggacgcagagaaatggctcgccgaggggatcgccggcattcagcacaacgc

SEQ ID NO: 89147 - DNA, 259 bp, Glycine max
  Clone ID: 700906471H1
atcttaaggtatctcaagggtaccttgtctcatggtttacttcttcagcctgcttctactgtgaaacccttggctttttatgcattctgtgatgctaattgggcatctgatgtggatgataggtgttccacctcaggggctgccttctttcttggcccaaacttgatatgcatggtggtctcgcaaggagaaggtgacagccaggtccaatactgaagctgaatatctcagcttggctcaaacttctactaaattgaca

SEQ ID NO: 89148 - DNA, 233 bp, Glycine max
  Clone ID: 700906472H1
attaatttaactcatcattaatcaacttcgcattgattaattaaatagcggaggcaatgacaagggtgatgcagggtcttgttctctgcacacttttgttgtcggcggttttggtccaagaagttgaggcaagagtaatcagcaaagaagcaatgcagcgtaacaccattcctggatgcagcaaagtacaccccaatgtcgccgcttgtcatctgccattagttaacatcaac

SEQ ID NO: 89149 - DNA, 260 bp, Glycine max
  Clone ID: 700906473H1
cgcttctccagccgctgcagactctgctccacttgctacttcctctagaagaagcctttttcaaatctctctgccaccggacccgttttcttctgttcatttgggtttctctcttccaatttatggcttctttgagacctaccctctctcaactttccctttcccaatccaattttctcagaaaatctacatggaacaatcatctaccttgctatttacacaaaaggatcgcaaagttgcaaacttttaccacttctaag

SEQ ID NO: 89150 - DNA, 260 bp, Glycine max
  Clone ID: 700906474H1
cgacgtcatccagggctccactgccatcaccatctcagattgccacatgaccaaacataacgatgtcatgctgtttggtgctagtgactcatacagcggagacaagataatgcagataacagtggcattcaaccacttcgggcaaggactggttcagaggatgccaaggtgcagatggggtagcgtgcatgtcctcaacaatgactacacccactggatgatgtacgcaattggtggaagctcagggccaacaattctga

SEQ ID NO: 89151 - DNA, 79 bp, Glycine max
  Clone ID: 700906475H1
ccaggagactactttattggtaatgtgtatgtcggattaagtggattcgagtgaaatgttgatcaggggagtcatttcg

SEQ ID NO: 89152 - DNA, 261 bp, Glycine max
  Clone ID: 700906476H1
caccacaattcacaaccgaaacagtttccatctctctcacaaaatgacaacaatatcaaattgctcccttctcttcctcttcctcttcctctccaccctccacatagcttccaccctctcaacccccaccaacttcatcaagtcctcctgcagcaccacccagtacccagccctctgcatccagtccctctccgtctacgcctccaccatccagcaagacccccacgagctcgtccagacagccctctccctctccctcaa

SEQ ID NO: 89153 - DNA, 260 bp, Glycine max
  Clone ID: 700906477H1
caacaacaaattacaacttcaaataaaacagagcatctctctgctcttctctgttctgttctgttctgttctgtttctctctcctccccatatattcctcttcttcttcagaactcagaactcagaagggccacttcacttttagaaacccagttttgcatctgggtttttgcctgttgaagtgccaattttgaagataataataaaaacaattatgacttggaaaagcagaggagaattgccttctagaagcgtcatct

SEQ ID NO: 89154 - DNA, 262 bp, Glycine max
  Clone ID: 700906478H1
cttaacaacagcacaaagcgggttactgtctgttcaagctaccatctctctctctctttcttagtgcctccttgccagaagttaaaatggcccaagaaactttcctattcacatctgaatcagtgaacgaggggcaccctgacaagctctgcgaccagatctccgatgctgtgctcgatgcatgcttggagcaggaccctgacagcaaggttgcctgtgaaacctgcaccaagaccaacatggtgatggttttcggagagat

SEQ ID NO: 89155 - DNA, 265 bp, Glycine max
  Clone ID: 700906479H1
gtacgccgtttcaactctggagttcaactctccgttgcctcgaaacgtcgttactgcgccgttaaggggaatcccgagctcgacacgttttattatctcggattgaaaggaatcagcgttggcggagaagctcttccgattccggaatcgatttttgaggttgacgccatcggcggcggagggattattatcgattccggcacggcggtgacgcggcttaggagtgaggtttacgacgcgctccgcgacgcgtttgtgaaggggg

SEQ ID NO: 89156 - DNA, 267 bp, Glycine max
  Clone ID: 700906480H1
gaagaagatgccgatcagaaacatcgacgtcggaaggcctgaagaggcgactcaccccgacacgttgaaggcggctttggctgatctcatctcaaccttcatcttcgtgttcgccggctcaggctccggcatcgcctacaacaagctcaccgacaacggtgctgccacccctgccggcctcatctccgcctccatcgcccatgcattcgccctcttcgtcgccgtctccgtcggcgccaacatctccggcggccacgtcaaccccgc

SEQ ID NO: 89157 - DNA, 275 bp, Glycine max
  Clone ID: 700906481H1
agctcgaccgaatcggctcgaggcataatcaaatcaaccatggcacacccttattgctcccaccaccttttcacctggtttacgatgctgaagctcttagaaaagctttccaaggatgggggaccgatgagaaaaccgttattgcaatactgggtcatagaaatgttcatcagatgcaacttatcagaaaggtttatgaggaaatttaccaagaggacctcattaaacgcctggagtctgagctctctggtgactttgagagagctgtgtaccgt

SEQ ID NO: 89158 - DNA, 268 bp, Glycine max
  Clone ID: 700906483H1
gtgtacagttacggtattgttttacttgagttgctaactggaaggaaagctgttgacaatgaatccaacctccaccatctgattttgtccaaggcagcaaccaatgcagtgatggaaacagttgatccagacattactgccacatgcaaggacctaggagctgtaaaaaaggtttatcagcttgctctattatgcacaaagaggcagccagctgataggccgacaatgcacgaagtgacacgtgtactcggaagccttgtgctgtcaa

SEQ ID NO: 89159 - DNA, 264 bp, Glycine max
  Clone ID: 700906484H1
tccatacatagccacttctaactcactcactcttgttgccttcatggccaagccagtgtccattgaggtatggaacccaagtggccaatacagagttgtcagcaccaaaccaatgcctggaactcgttggatcaatcttctcattcaaaatgatgttcgccttgaaatatgtaccgagaagaaaacgattttgtcagttgaagacatcattgctttgattggtgataagtgcgatggagttattggacagttgactgaagactg

SEQ ID NO: 89160 - DNA, 256 bp, Glycine max
  Clone ID: 700906485H1
aattcttcattgctctcaattatcaatggctccccaaaccatttccattctcaacctcttaccagaacctgatgtcttcattcacacttcccatggaacacgcattccagcccacgcacccattctggcttctatgtccccggttctggagaacttgatagatcgcccacgtaagcatcggagctccgagagaataatccaaatccacggcgtcccctgcgacgctgtcaccgccttcgtccgattcctctactcc

SEQ ID NO: 89161 - DNA, 255 bp, Glycine max
  Clone ID: 700906486H1
cccaatcttctctccacgcccttcttgggtaaccgtctgaagtgcagcaatggcagatggattgcattcgcagcatccatcggtagttcagaagttatctggacagtcttatcttgtgtccaggcttgctcctaatcactccagaaactgttctaccactggtagtatattcaatggaggtttgcagtcttcaggtttggttccagtcacggcacacgcgccggctgagaaaggggtgtctggatttttgttgga

SEQ ID NO: 89162 - DNA, 256 bp, Glycine max
  Clone ID: 700906487H1
ctggcagccaacatctatagtcagttacaaccatctgggaaacaatgatggtatgaatctttcggctccacaaactttccgttccaaggtaatctccaagagcaacgttgttgatgatatggtcaacagcaatgccatcctctatgagcctggtgaacatccagaccatgttgttgttattaaggtaaattttgtttcacccatttttctgtttctttctcttgtcagggctttgattattctatctgctttgttg

SEQ ID NO: 89163 - DNA, 257 bp, Glycine max
  Clone ID: 700906490H1
gtggagagagggggaaatgggtgggtctccaaagagagtttgagcaaagccattaagttagtgatggatggagacagtgaggttggtgctagagtgaagaagaatcacatggagtggaagaaaactgggagcagtcctaatttaatgaatggttacatggataggtttgtccaaaatcttcaagattttcctctccatgggtgattgaaggatttttttcagagggatggaattcatcgtttgcccaccaaatgaaa

SEQ ID NO: 89164 - DNA, 255 bp, Glycine max
  Clone ID: 700906491H1
gtggatcaggtgggcttaaggttgaattagggcagccatctgggaaattgagtgaaattgaggagcagggtgggaatgatggtactgatgtgcaggggattgggcagcaaccacatggtggagttgttgggagtgtcgggaatgagggtttggtgagacaaggtcaaggtggtggaggaggagcagggaatgttaatagggttggtggaaatggtgttgggaatagtgtgagtactgttaatagtgttaatactg

SEQ ID NO: 89165 - DNA, 244 bp, Glycine max
  Clone ID: 700906492H1
caaatcactattgatatggttagtaatttcgagattaaaggtacagttaagatataatcagaattttttagttatgaatttatgatcaagaagctattaagaaataaatccagaccagaccaaaccagaccaagaagttgctgttgtagagaagatgcaagtgcagccaagagttattgcagataatacaactgcacaaatcaagatacgaaaaataaggttgcatttagcaaaagtggcacag

SEQ ID NO: 89166 - DNA, 127 bp, Glycine max
  Clone ID: 700906493H1
cggctcgtagccaaagcaaactcaagactctagcccctttattaaggaccgtctcgtcttctcgatagtccgttaatattccgctgcggtttttgaatctttcaagattgttccacacaacatccga

SEQ ID NO: 89167 - DNA, 261 bp, Glycine max
  Clone ID: 700906494H1
cggaagttcattggtggaaatccaagttcccgggcagaagtttgtgaacggagttccgttccccgctgtggtgtctcctccacctgcaactgcaagtgcggttcctcttacggactccgtcaaaacccagtcagctttccttgaatcattgctactccaatcgggtgctgtccttttcaggggattcccactctccaccgcttctcacttcaacgacgtcgtcgcagcattcggctacgacgagcttccctacgtgggcgg

SEQ ID NO: 89168 - DNA, 265 bp, Glycine max
  Clone ID: 700906496H1
cgacatagggaccttaagaagatgcaagatctactcctaaatcaaaaggaagccatgtatggttctaaacctagtccaagaaaaaataacagctttagaaagactaatagttaccgcgcaaatggcaatggatctatgcctcctacaccccgtcgtaactccctaagtggtggaacaacatctgaactactgacaccgcggtcctactctggccgtcagaatggatattttaaggaaatgagaagattgtctactgcactactga

SEQ ID NO: 89169 - DNA, 259 bp, Glycine max
  Clone ID: 700906501H1
cctgtattaatttttctctccctgagattaccaagctctgcaactttgcttctcaacatggagtatcgtctcctacccatttttactttactcaatcttgcactggtggcaatccatgctgctttacctcctgaagtttactggaagtcggtgcttcctactacgccaatgccaaaagccatcactgatatcctttaccccgattgggtggaagagaaaagtacctcagtgaatgttggaggcaagggcgtaaacgtgc

SEQ ID NO: 89170 - DNA, 144 bp, Glycine max
  Clone ID: 700906504H1
gaccagtttcagattagggctggtattggccgagattgcaccctcgattacgaggttgaggaggatcaatatgacaagcaggctataggcaaagtgaattcgggtgatcgtgtgtatatgaaggatctaaacgacgatggagtt

SEQ ID NO: 89171 - DNA, 260 bp, Glycine max
  Clone ID: 700906508H1
aaaatatggacaaaaaatggctaaggggaatccatgccctcgagcataatacagatgcactatggcagttggttgcccagttcgcaaacaagttcaacgttgtgctgatgatagaacaattttggtgacaacatatgaaggcacacataaccatccactgccaccagctgcagtggttgatgccatggccatagcagcaggtggcagtggatggttatggcatcaaccactgcagctgctgctaccatgttgctgtctgg

SEQ ID NO: 89172 - DNA, 253 bp, Glycine max
  Clone ID: 700906511H1
tttcgttattctcttattcatccttctcttctgaataatctcgatctctttctgcccttttctccgtcacgcttttcgtgaccggatctgtatggatttgatccagatctacacgccgatggtgcctttggccgggtctttcataaatctggtgcgtagaggctcagatacacggtaccgaggtacaacagagaatcgatgacaagaacgcagatccgacggtagatccagccgattccgcttgttcgatcgc

SEQ ID NO: 89173 - DNA, 255 bp, Glycine max
  Clone ID: 700906512H1
gcgagcccccgtcctacctcactggcgagttcccaggtgactacggctgggacactgctgggctttcggccgacccagaaaccttcgccagaaaccgtgagctcgaagtgatccactccaggtgggccatgctcagggccttgggctgcgtcttccccgaactgttgtcccgcaacggggtcaagtttggagaagctgtgtggttcaaggccgggtcccagatcttcagcgagggtgggctggactacttgggca

SEQ ID NO: 89174 - DNA, 252 bp, Glycine max
  Clone ID: 700906513H1
gaaagacttactagagtttttacacaaaaaattcatgatttgattggaactcacacagatgtgccagcacctgatatgggaacaggaccacaggatcttggtggatctctcggtagagacgcggctacaggacgaggagtcctctttgcaacagaggctttgcttaatgagtatgggaagagtgtatctggacaacggtttgtcatacagggttttggaaatgtagggtcatgggctgcccaattaattagt

SEQ ID NO: 89175 - DNA, 254 bp, Glycine max
  Clone ID: 700906514H1
tactactcacactcactgcagatctcaatccatggctaccattgttagcatcaaggccagccagatctttgacagtcgtggcaatccaaccgtcgaggtggatttgacatgctccgatggtacttttgctagagctgctgttccaagtggtgcatccactgggatttatgaggcccttgaattgagagatggaggatctgactaccttggaaagggtgtatcaaaggctgttgacaatgtgaacaccattattg

SEQ ID NO: 89176 - DNA, 250 bp, Glycine max
  Clone ID: 700906515H1
agaagagtagcctgagccagtaccagaaccaccaaaattggttcgtatggcaaatttgtgtgttgtgggtggtcatgcagtgaatggggttgcagagatacatagtgaaatagtaaaagatgatgttttcaatgcattttataagtagtggcccgagaagttccaaaacaaaacaaatggtatgacaccaaggagatggatcaggttctgcaatccagatctgagtaaaataataaccgagtggataggt

SEQ ID NO: 89177 - DNA, 254 bp, Glycine max
  Clone ID: 700906516H1
cttcaattcattctagttctggattccgactagccgcgttgactcggttccgttattcattctcgcggatctaatattaaggaatagcttaagggcacattacaatgaaggcattgattctggttgggggatttggaacaaggctgaggccactgacactcagtttccctaagcctcttgttgattttgctaacaagcctatgattttgcatcagatagaagcccttaaggccattggagtgactgaggtagtg

SEQ ID NO: 89178 - DNA, 258 bp, Glycine max
  Clone ID: 700906520H1
aagaaattgcgaagtctaaagccaaagaagagaagaagaaagtagaggctgagattgagctgctcttggtagtagagaagcttcaagagttacgctccataagaatacaaaagttgaaaaaacaaggccattttctcccagaggaggatgacaagtttcttgagaaagttcaagctgctgtggaagaagaggagcgtgaagctttggctgcagttgaaacagatgctgctaaagatgcaattgcaactgctgaggaat

SEQ ID NO: 89179 - DNA, 256 bp, Glycine max
  Clone ID: 700906521H1
ctcttctggatgaattgcttgttgtcatttcttttgatggatcttatgtcaattacagacatttggctattatttgtgataccatgacttatcgagggcatttgatggcaattacacgtctaggtatcaaacgtaatgatactgggccaatgatgagatgctcatttgaagaaacagttgatattctgcttgatgccgcagtatatgctgagcatgattacttgaggggagtcactgaaaacataatgttaggtca

SEQ ID NO: 89180 - DNA, 256 bp, Glycine max
  Clone ID: 700906525H1
gtttctcctcgttgttcttcgctttcctgttttcaatttcgattctttcgttaatttaataagatgtttgggagggcaccgcagaagagcgataatatgaggtactacgaaatcctcggcgtctccaagaacgcttcgcaggatgatctgaagaaggcttacaagaaagccgccattaagaatcaccccgacaagggcggtgatcccgagaagtttaataagctggcgcaacttatgaggttctgagtgaccctga

SEQ ID NO: 89181 - DNA, 257 bp, Glycine max
  Clone ID: 700906526H1
ctcacctctctctctctctctccctccctcctagggtttcacgtttccatgtgaaaacggtttgagaatctctctctcattctctctctattttatattttctttcacgtcaattagggtctattttgctggcgtgattctgaaggcttggatctggatatcttctttgcttctttgctatggaagactcggattcagttgctacactgatagattctactacttctaagatacaacagctgcagaaggcatttgct

SEQ ID NO: 89182 - DNA, 249 bp, Glycine max
  Clone ID: 700906528H1
gtttcgggtacggaaaaggtttggaaaatgtttcaagctatcggtgacattgcctttgcttatgctttttctaatgtcctaattgagatccaggacacactgaaatcaagcccacctgagaacaaagtcatgaagagagcaagtttgattggcattatgactacaacattgttttatgtactatgtgggtgcttaggctatgctgcatttggaaatgatgcaccatctaatttcctcacaggattcggc

SEQ ID NO: 89183 - DNA, 251 bp, Glycine max
  Clone ID: 700906529H1
ggccttctaattggaggaaaaagaggattcattttcatgactttatgttgaatgtacatagcatgctacaaaagcataaggggttgtcagatccacttgatgtggttgcaggagagatttctgatgatgcaattttattatgtcttgacgaatttatggtaacagatgtagcagatgcattggtactaaatcgcttgtttagacatttgttcaacaaaggcatacatctagtggccacatcaaatcgtgct

SEQ ID NO: 89184 - DNA, 258 bp, Glycine max
  unsure (1)..(258): unsure at all n locations
  Clone ID: 700906530H1
accgaggccaatcaagcaaaggttaaggagattttgtctcactatccacacaacatacgattctcngntacaattcctcntttagatcttgtccagnagnagnatgaattttggctacctgtttctgcaatggatgcggtagctaagattgtagaggttcctcccatacgggtgtatgaggttgccacattttactccatgttcaatcgagctacggttgggaagtaccatctgttggtttgtggaacaacaccttgt

SEQ ID NO: 89185 - DNA, 249 bp, Glycine max
  Clone ID: 700906532H1
cgagtacagcggcaagtaccaggctgcgggtgaattgggtcacgttaaggatctcataaaatgggggaccgattaccttctcaagaacttcaacagcaccgccgacaccatcacccagctgggcatgcaggttggatccggggacacctcccaagggagcgccactcccaacgaccactactgctggatgcgtcccgaggacatcgactacgaccgccccacccagacctgcaccacatgctccgattt

SEQ ID NO: 89186 - DNA, 253 bp, Glycine max
  Clone ID: 700906533H1
ctctaataagggttcctctttccttctctagcacaatttacaatctcaatggctggaatttgctgtggtgttgttggagaaggtgacactccggctccactcaagcccactcctcgcccctccaggcgccggagtttggacatcttacctttaaaatatatcgccgacatgcccatgccgccgccggaggctttacggaagcgtcccaagctcaacctcagggactgcgataacgcaattgaaaattgcgacg

SEQ ID NO: 89187 - DNA, 251 bp, Glycine max
  Clone ID: 700906534H1
agaaagtgacgaggtaggtcatgacatccttcagccagcttcagtcacagatgcaatctcagggacttgtagtgcctcctgagcctctggtaggtcctggtccctccggtcctcgggtgagcacaaatgggagttgtgttgatccctcaggaagcgatcctaagacgggtgactctgacaggtgcggcttgtacatagaagtagatcctgcccgcctggttgccgtggggagagtttatgagggatccact

SEQ ID NO: 89188 - DNA, 256 bp, Glycine max
  Clone ID: 700906536H1
gttccagatgatgaagacagagaattgttgcaggaaatcataaacaattctaagttaagtgaaggatatctcacccttgctcgtgatattgaagtcatggagcccaagtcccctgaggatatatacaaggcacatttgcttgatggccgggctagtgctggtgcaagtgttgattcagctagacagaaccttgctgcaacttttgttaatgcatttgtaaatgctggctttggtcaggataaattaatgactgttc

SEQ ID NO: 89189 - DNA, 254 bp, Glycine max
  Clone ID: 700906537H1
ccagggaagtatctagggctgagaactattcgtgctcaacggcgttctccaagtgactctcctcgtcgctcccctagctattctccttatagaagaagctatagccggtctccctattcttcagaccgaagtaggagtcgttcttactctcctgactataggaggaggaagtcaaactatccatatcactctaggcgaaggtcatactctccatactacagccggtacaggtcttattctcgatatgatcgaca

SEQ ID NO: 89190 - DNA, 100 bp, Glycine max
  Clone ID: 700906540H1
cttctctcgctccttcatttgcatgtacttctctggaggtatataactattattctattgtgtttgaaacataaaaatggtttaaatcttttgccatggg

SEQ ID NO: 89191 - DNA, 160 bp, Glycine max
  Clone ID: 700906543H1
caaaaaatggctctatcgcgcgtggctcaatcgtcgccatcacagtcgaatcttttgaaacccctctcgtcgtacttatccctacgacgccgttcgatgtcgacctcgtcggagcccctcaccgtggagacctcggtgcccttcacctccacacaacata

SEQ ID NO: 89192 - DNA, 79 bp, Glycine max
  Clone ID: 700906545H1
ctttctccgatggctaatccctcactcttgttctacagtctcctcctattatccgccaacgaagccgcaggagaaagga

SEQ ID NO: 89193 - DNA, 235 bp, Glycine max
  Clone ID: 700906549H1
ccctaacggagcatgtggtcgcatagctaaatcttacttgaagtacactacttaaagctagagtatgtgttgtagttatatgtgtcttaaaattgttatgcctaccctatcacaataaattattattataataagagagtatgttgcttgatcatatggctacaatttgtaagtgatgattaattaccaataatcgaatctttggtaatatatatttaaaaatcaatattatatt

SEQ ID NO: 89194 - DNA, 255 bp, Glycine max
  Clone ID: 700906552H1
cctcaagccactctaaagaaaatggcggtgcctctactctcgaagaagatcgtgaagaagagggtgaagaagttcaagaggcctcagagtgacaggaaaatttctgtcaagacaaactggcgcagaccaaagggtatcgattcccgtgttaggagaaagttcaagggatgcactttgatgccaaacattggttatggttcagacaagaagacccgccactatctccctaatggttttaagaaatttgttgttcac

SEQ ID NO: 89195 - DNA, 216 bp, Glycine max
  Clone ID: 700906554H1
gtcccgtctgaggttgtggttggaattgcctcaaagcttgttgccttccagatgcaaagctgcctttgtcatgcttcaagagggctactggccaggatttggccctgcatgcatgcgccggggtgcctcctctcacattgctcgactcccttctacctccagagtgggtcgatcgcctgcagagtggcctttttcgcgatgatgttaccgcctgtg

SEQ ID NO: 89196 - DNA, 83 bp, Glycine max
  Clone ID: 700906555H1
aaagaaggcgtcttcataaacgcctttcttctccgtttccgtttcctcgttcgaattcgctttttgatctgcgaaaatgagag

SEQ ID NO: 89197 - DNA, 251 bp, Glycine max
  Clone ID: 700906556H1
gtaaaactcttcaccaaaaagggcttcaacatcgaagaaatggtgatcctactcggtgcacattctatcggcatggctcattgtgacttgttcatccaaagggcatacaacttccaaaacacagggaaacacgaccctacccttaccgtcgaagcggttgaggaattcaaaaaggcatgccccaatgttaatacacctaagtacaggaacccccctgtcaactttgatgcaacaccaactgtgcttgataa

SEQ ID NO: 89198 - DNA, 144 bp, Glycine max
  Clone ID: 700906558H1
ttaagcatttactcctattgggatggtcaagtactgttgcgttatgtgcttgtgtttgatcttacttcacattttcctgcgctttgtgccaatacagtcagcacctgaaagtgccattgtgacacagattcctggcttcagtgg

SEQ ID NO: 89199 - DNA, 246 bp, Glycine max
  unsure (1)..(246): unsure at all n locations
  Clone ID: 700906559H1
attttctacagctatgacatactcgccctttcgagaggcctcgtttctcgtctgcaacgtgtcgccgtcgattcgcagttgtcgctccgatttctgagctccgatgcggcagcgattcggtctcggataattgaaccgaagcccagtgcgatgacccctaattccaagcgaactgggctcatancggtgaagtgtggaatgagcgctctatgggataaatggggagctagcattccaattactgtg

SEQ ID NO: 89200 - DNA, 246 bp, Glycine max
  Clone ID: 700906561H1
aggacatactaatgcgtgttttggctcaaaatctttctcctgagttgactctcgtggaaaaggtaatgactccaaacccagattgtgcatcagtagatacaacgatactggattctctgcatatgatgcatgatgggaaattcttacatcttcctgtggtagacaaagatgggtatgtagtggcttgcatggatgttttgcagataactcatgctgcaatctccatggttgagagtagctctggag

SEQ ID NO: 89201 - DNA, 121 bp, Glycine max
  Clone ID: 700906566H1
gtggaaaccaaagacgggaaatcggtaacgttttctataatgagacagggtattaacggctagaaacgaaggaaggagtaacatacaatggaggttcaatttgccctcccattccactaac

SEQ ID NO: 89202 - DNA, 102 bp, Glycine max
  Clone ID: 700906569H1
attccccaagagcttgaagacagatacgggagttggctaagtccccagttacagtaagcaaccagttttctagtttacatgaagaggtttcaataccacaca

SEQ ID NO: 89203 - DNA, 71 bp, Glycine max
  Clone ID: 700906571H1
ctgagaataaatttagtgttagtagctccattgactttgtgggacaagttgaatatgacacagagtttact

SEQ ID NO: 89204 - DNA, 248 bp, Glycine max
  Clone ID: 700906572H1
tgttgatatagcagccaaagaactaatagcaattgcttcccctggacaagttacacaggtacagcttgaccgagccaaaaaatccacaaagtctgcagttctaatgaatctggaatctagaatgattgcatcagaagatatagggaggcagattttgacttatggagaaaggaagcctgtggaacagttcttgaaggctgtagatgaaatcacgttgaatgatatcactaaaattgctcaaaagatta

SEQ ID NO: 89205 - DNA, 246 bp, Glycine max
  Clone ID: 700906573H1
gccaacaaacgacgtcgtgtggtttccaataccttctacgttttgaatttttacgagaattgagatggcgaacgagaacgaacccgcgaagtgtttgttaccataccttcaacgcgccgatgagtcacaaaagcacgaaccactcgtcgcttattactgtcgattatatgctatggaacgggggctgaagattccgcaaagtgagcgcacagagaccactaatgctcttctggtttcgctcatgaa

SEQ ID NO: 89206 - DNA, 244 bp, Glycine max
  Clone ID: 700906575H1
gcaaaattatcttccgtttcaggattaggctttcaccgttacagtgaaacatgggagaaccaaaacgaatctatctgcgtatctttgcgctgctcctcttcatttccgcctcttcgtttcaccttctccgcgctttcgatgacgtgatcttttacgcgtcgttcgacgaggatttcgaagaccgttggattgtgtctcagcaagatgagtacaatggtgtctggcaacatgccaagagtgaggg

SEQ ID NO: 89207 - DNA, 95 bp, Glycine max
  Clone ID: 700906576H1
aacactctcatctggtctctatgtctcgaatcttctccgcatggaacaagaagaagctgcaccttcatctcaacttaatccccactattttttct

SEQ ID NO: 89208 - DNA, 208 bp, Glycine max
  Clone ID: 700906577H1
gtgtggttaaaagttaagaagtagcaaagatgtttccattcgggcacaagggtcaaaagataaaggggactatggaggttatgcagaagaatgtgttggatatcaacagcatcaccagtgttgacgggatcgtcggcaccggcttagacttcttaggcagtgcactcgatacagttacttttttagcctcctccatctccacacaaca

SEQ ID NO: 89209 - DNA, 75 bp, Glycine max
  Clone ID: 700906578H1
gcttggagcaattaatcgttttaatgaacgatgtggtcaactgcacaatttcttgcaagatattagaatatttta

SEQ ID NO: 89210 - DNA, 242 bp, Glycine max
  Clone ID: 700906579H1
agttttggggttagattaggtctacctacccaaaacaaaacttcaatttctgtttcagttcgcggagatcaatattttatctaggtccatcgtcgatagtcgatacgagtcaccaaaggcaatgtttttgtgggattggttttatgggattctagcgtcgctcgggctgtggcagaaggaggccaagatcttattcttgggcctcgataacgctggcaaaactaccttgcttcacatgctca

SEQ ID NO: 89211 - DNA, 243 bp, Glycine max
  Clone ID: 700906580H1
tgggagttgtcaaaggcatctgtgaagatcatcataggagaaagcgtgtggtgggaagcattgaaatggaatgcagcagagtggggagatgctggtcgacccaatgtttttgaacgaattttttcaccaatcagtgaggaggctgacatcatgactcaactggctgcacatcaagagactcaattaagtacagatcacgatgagtttctgggaaccaaacaaaggcatgatgatagtaagtta

SEQ ID NO: 89212 - DNA, 131 bp, Glycine max
  Clone ID: 700906584H1
agatagtttcggtggagcatagcaatttgttggtctgctaccattgtttgatcctcgcaggcatgatagtgctgaaaccattcgaagagctcttaaccttgcgtgtcaatgttgaagatgattcactgggt

SEQ ID NO: 89213 - DNA, 247 bp, Glycine max
  Clone ID: 700906585H1
cttgattcttctcatactgaagacttaattccagaagtgattatcaaatgtctcaatgaatgggatattgactgcaagctttttgccttgacacttgatgattgttccatcaatgatgacatcactcttagaatcaaggagcgagtttctgacaaaaggccttttttaagtactcggcaattacttgatatacgctctgaagcacatctcataaaatccaatgctcaagatgcaatggacgcattac

SEQ ID NO: 89214 - DNA, 245 bp, Glycine max
  Clone ID: 700906587H1
cttttataattattttaaaagtttaatttcaatatattattggtgactcgtaatttgtgaagttgtttatacggtcaactaattaaaaatcacccttaattttgaattattatattttatatcaaactcattgttttaaaatattttcatattgcataatttcctttatttttataaatagcatggtattttgtaatatacaaaatcttaggtcataaaacaatatttattgtctaaattcgtga

SEQ ID NO: 89215 - DNA, 251 bp, Glycine max
  unsure (1)..(251): unsure at all n locations
  Clone ID: 700906589H1
aagtggaggaaattgtacttggagaggcaagtggaattgggacttagagcaaggtctgtcgtgaagtttctggaagcttgttctcgttccgagtcacttgaggttggtgactatctgaaagctgttgacaccttgattggtaccatgtttgggtttgaagacgtgcagaggttcttgttgcaaccctcaaatgaatgtcgctgattgaacttnnggttggggctacactatttgcctacacacacatatcg

SEQ ID NO: 89216 - DNA, 241 bp, Glycine max
  Clone ID: 700906591H1
ttgggatcataaaatttgaacattggattctcttcagtaagagccaagttagcatcataaaatgattttattgttccaatgtcttcccaatagtcattgaaaaaatacgcttggacattgttttccctcactgctgcaggaatgatttcagatccaaagtcattggatgtaggatatctccatttcagaagcttgagtaaaacatctgtcttgaatacataaacccccatagatgcaatat

SEQ ID NO: 89217 - DNA, 244 bp, Glycine max
  Clone ID: 700906592H1
gctcgagactagttctaggaaagaagaaataaagtggttgagaaaattcatcaatcagcaattaaaataaccaaaacacgaggtgtcaagctctctgatttccgtgtcatcaatcaggatccaccagccatttctgatgaagcagtcatcaaggcagtagagactgcaacaaaagaactaaacttgacaagcaagttgatgattagtagagcctatcatgattcattgtttatggccaggttgt

SEQ ID NO: 89218 - DNA, 241 bp, Glycine max
  Clone ID: 700906596H1
cgtcttcctcctcagcttcgcaatcgcagttcgcctattaaaacccctcctcctcctcctcctacttccccgttccctttcaccttcagcaacccgcaaccactcactacgctgcgccctacgtcgccgccccctccgtgcaaatccccgctcctccagtcgtcggccccgttgcgcccgcccctgtacccggcgtatactccgccgtgccgcaatatcaggcacagcagttatttgagag

SEQ ID NO: 89219 - DNA, 251 bp, Glycine max
  Clone ID: 700906603H1
attcaatttggagtggacgaaagctatacatgctggttccaaaagccaaggaatcttcccaagtcacgattaaagcaaatacagtttatggtgcattgcgcggattagagacattcagccagttgtgttctttcgattatacaactaaaacagtaaaaatatacaaggcaccttggtccatccaagataaacctagatttgcatatcgtgggcttatgctggatacatcaaggcactatttacctattgat

SEQ ID NO: 89220 - DNA, 252 bp, Glycine max
  Clone ID: 700906605H1
tgttgatcgagataactagaaacagtgtgatgaaaatgaaggtccttgttttcttcgttgctacaatttcagtagcatgacaatgccatgcgtacgatatgttccctctccgaatgaacactggctatggtgcccgtactccggaggtgaaatgcgcaagttggaggcttgctgtggaagcacacaacatctttggctttgagaccattcctgaagagtgcgctgaagcaacaaaggaatacatccatggcg

SEQ ID NO: 89221 - DNA, 255 bp, Glycine max
  Clone ID: 700906610H1
cagagaaatccataccagtaacgaacaaagatggcgaaaatcctacacctgcaaaagctgaagttcctgacaacgagtttcacaagcgcataagaccagaggttatccctgcaaatgagataggggttacatttgcagatattggtgcgttggatgagattaaagaatcacttcaagagctggtaatgcttccccttagaaggccagacctcttcaaaggtgggcttctgaagccatgtagaggtatattgcttt

SEQ ID NO: 89222 - DNA, 106 bp, Glycine max
  Clone ID: 700906611H1
gaagacattctcagttgtgttgtctgacaaaacgaacagcaattgggagcagatgcaagatccatcttcaaaccctaattccaatccaaatcccaatacccacaac

SEQ ID NO: 89223 - DNA, 256 bp, Glycine max
  Clone ID: 700906612H1
attccacaatggattgggcatggtgaagacattggagatgtgctatctatcaatgtcttggctccaattctgctagttcttctgacttttattctctgtcggggtgttcaagaatcgtctgttgtgaattctcttatgacagtgaccaagataatcatagttatcattgtcatttttgctggagcatttgaggttgacgtttccaactggtctccctttgctccaaatggtttaaaagccatatttacgggagcta

SEQ ID NO: 89224 - DNA, 258 bp, Glycine max
  Clone ID: 700906613H1
acacaattccaattcctctggatctcgtctcgatacgatcgatctcgaacatgagcactggggagctcctcaacatcgaacctctcgaactcaagttcccctttgagctgaagaagcagatctcatgttctcttcaattgtccaataagaccgatagctatgtggccttcaaggtgaaaacaaccaatccgaagaagtactgtgttcgtccgaacactggtattgtcacgccacgatctacgtgtgatgttatcgtta

SEQ ID NO: 89225 - DNA, 253 bp, Glycine max
  Clone ID: 700906615H1
tagcctccttacattctgacccagcttggctttcatacttgttttgtgtggcagagcaagagagagcgcaatggaaggtatctcagtgggtttgaagaagtattggagaagaagcattaggggatacccaagattacacgtctcggatcggcgaaagaaggaaacggttcagcttggaggcagctagagaaggaggagatggcgcataaagttagctcgtaagatcagaattcccaaaatctcttctccaaag

SEQ ID NO: 89226 - DNA, 258 bp, Glycine max
  Clone ID: 700906616H1
gcacaagattgcaaaatgaagttcaacattgcaaatcccaccactgggcgccagaagaagctggaaatcgatgacgacctgaagcttcgagcattttgggacaagaggatctcccaggaggttcttggtgatgctctgggtgaggagtttaaaggatatgttttcaaaatcaccggtgggtgtgacaaacaaggattccctatgaagcagggagtgctgacccctggtcgtgttcgacttttgctccatagaggaact

SEQ ID NO: 89227 - DNA, 252 bp, Glycine max
  Clone ID: 700906621H1
gtgcaagtttgtttattctgagaaggaagagagaatagaacgccatggatgaaatattgaacaaggtggggtcttactggttctccaagaaggccagcaaggaatttaactctgtcggcgatgatatcaactcactgtcaaccagtattgaagggggaaccaaatggttggtcaacaagttaaaaggaaagatgcaaaaggcattaacagagttgctaaaggagtatgatctacccataggaatctttcctc

SEQ ID NO: 89228 - DNA, 58 bp, Glycine max
  Clone ID: 700906624H1
ggacgagaccaccatgcccttaacgttcaccgaccacgtcagctggttcgacgcctcc

SEQ ID NO: 89229 - DNA, 82 bp, Glycine max
  Clone ID: 700906625H1
ccggcgtcacaactcactcacgagcggggccaacctcgcacactattcagtggctagaggcccttgcttggtaagcacccgt

SEQ ID NO: 89230 - DNA, 253 bp, Glycine max
  Clone ID: 700906626H1
gggattgtggcaaatttctatagcctacattcatggatgagtttggcttttgtatccctcttcggatcccaggtatttgcttcttcatgatccttgataatttcttagtaaaatattacctcttgtgtttttatagaaactaaagcatacaattcacaccaccaaagctcatatgaagttcctgcaaatgaaatttcatgaggagttctccaatctaggtaatattttgcttatgattaatttatttaagttc

SEQ ID NO: 89231 - DNA, 255 bp, Glycine max
  Clone ID: 700906627H1
ggcctctgttctgtgttcagtcttcaaccacctcaacacatagaagacccacacacttgtttttgctccaaaccgccctctgattcccgaacccaatgacttctccgctggtggcggagggcgccgccgtcacggcgttccgatcggtgatgctccgggtgcagcaggcggcggagagatccgggtccaaacccgaccgggtccgggtcgtggcggtttccaagacgaaacccgtcactctgattcaacaactct

SEQ ID NO: 89232 - DNA, 258 bp, Glycine max
  Clone ID: 700906628H1
aaattgctagctccaatatattaccaccaccactgcaaaatattctgaagcagagatcattgtccattatcacagaaatgggtgaagaagaagaaaagaaagaagagaccacagaggaaaagaaggaaaaagagcctccagagatagtgctcaaggttgatatgcactgtgaagcttgtgcaaggaaagttgcaaaagcactgaaaggatttgaaggagtggaggaggtgactgcagatagcaaggcaagcaaagtgg

SEQ ID NO: 89233 - DNA, 84 bp, Glycine max
  Clone ID: 700906631H1
gtgacctacggcaccattgccccattgggtgtcccccaacagggtatccacatcaatggtcagtttcccggccccgaaatcaac

SEQ ID NO: 89234 - DNA, 262 bp, Glycine max
  Clone ID: 700906632H1
attcttcatcgttgccaaaagcgacaaaccaaaattatatacaaaaaaaatacttaaactccatttttgtcttccacacacactctcctatactgtttcaatttcaacactctcattatcataagattcccaccgaaaaacctctcacaccatggtttctcgccatttggcttcttcgtcttcctctgtttcctctgtttcgagatctctgtttcgtcccttcgattgcacggtttggaccaagacgccaaggccacgcatg

SEQ ID NO: 89235 - DNA, 248 bp, Glycine max
  Clone ID: 700906635H1
acaaggcattctgaggccatggacttcagagattggtgcgagaatgagtgtgttaggcttattgggacaaaagatacgagtttccttgagttttgcttgaagcaatccagatcagaagctgagatgcttcttatagaaaaccttggatcatatgatcctgaccacgaattcattgataaattcctcaattacaaggagttgttaccatcagatgttttggacatagcttttcagagtagtaggaatga

SEQ ID NO: 89236 - DNA, 247 bp, Glycine max
  Clone ID: 700906636H1
gcgaacaccatggatgtggggaggtctgtgttggttcagaccgagccccgaacgaggttgcctcccggcacctgggggaccatgggggttggtcttggttattgtattgctgccgcggttgcttcgcccgagcggcttgtggttgcggttgaaggggattctggatttgggtttagtgctatggaagttgagacgttggttcggtaccagctgcctgtggtcgtgattgttttcaacaatggtggtg

SEQ ID NO: 89237 - DNA, 172 bp, Glycine max
  Clone ID: 700906638H1
aagcaagcaatggctattactacaccttccaattcttcaattctcatctccctttctcccatgctcatctccatatccctcgctgagtcgcaatctttcatcggagtaaactacggccaggtcgccgacaaccttccggcgccggaggacacggccaacctcctcaaatcca

SEQ ID NO: 89238 - DNA, 251 bp, Glycine max
  Clone ID: 700906642H1
ccaggacttcgacatgatcaccgaccagcggagaaacgagcagaggctcaagatgaagaagaagatcctcatcagcgtactctccgccgtcctcgtcgcgtgcgtcgtaggcgccgcggcattcgtcgttgtccaaagaacaggcacccatgcacagcacgctaccccaatgccacagaacaccccccacctccccgtggatcagaactccaggatggtgaaaatgatctgtggatccgcagaacacaaag

SEQ ID NO: 89239 - DNA, 85 bp, Glycine max
  Clone ID: 700906647H1
cagaaagagacaagaagaagaagatggaggtgagtttatcctcaacatcatgtatacccttaagctcgaagttgaagcataagca

SEQ ID NO: 89240 - DNA, 255 bp, Glycine max
  Clone ID: 700906648H1
gttccgttcagcatcgctccactctctcagacgaggttgttcatatgtgatgaactgttgaaagatgtttgaatgtggtcccaagtcagaatacatgggtggccagcgggaaaattttttgaggttggaggccttggattctacactatgttcatccactgatgccggagttataaaatctggatttaatattgataaattaagccatggtcatggaagcagcacaacttctaggtctttcaaaaggggaatgag

SEQ ID NO: 89241 - DNA, 248 bp, Glycine max
  Clone ID: 700906650H1
cgcaagcatctccctatctcctaagcaagcaattgcccttaaccctcaaaatcttcctctttctctcacagccattgattctccatggacgaatcggagcaatacccgaaggagtattaccctaacgatcaaacaatcaccagaagagtctcctcgtcctcttcgacgaccagcgtccacgtgacagccctagacggcctggtgaacgtcaactccctcttcacaatcgcagtgttcgtgggcctctc

SEQ ID NO: 89242 - DNA, 87 bp, Glycine max
  Clone ID: 700906655H1
attgtggctacccatagtgtcatatagtgtcatacagcaacaaaacaccagcaacacacaacaatgggttatcttatggcaggatgg

SEQ ID NO: 89243 - DNA, 78 bp, Glycine max
  Clone ID: 700906658H1
atggtcgaaagcttgagccagagagagtacgtttgtgtgttgaggttaattattattattattgagtattgagcatgg

SEQ ID NO: 89244 - DNA, 237 bp, Glycine max
  Clone ID: 700906659H1
tgacagtgttagtttgcgctttgtgttcaggttggttgtgctgtacattttgtttgtgggttgcgttgtggtgtcgacgtccgccctcccctccgtcatcgtcaaactaatgggtgtgattgtttcgtttttgggcgtcttgtgtttgattttgggagtcatagctgagaacaaaaagcgtggtggtggaatgcccgtgcccgtgaaggatggtgtgacatgcaagttgtcagccga

SEQ ID NO: 89245 - DNA, 250 bp, Glycine max
  Clone ID: 700906662H1
gtctgctacggcggcatgatcttgtcctacctcgtcgctctcgcccacgagcgccgccacctcctacacgcctaggaccaccattcgcagcatcactgattccatccaccttcagcacgatcctggttgaattggaggtggttagcttgcttgatctttgttttaaaatctgaaaaatcaaggcagaaagatactgtcagcttctgtgtatttcatcatttggatgataaaataagtcatatttgataca

SEQ ID NO: 89246 - DNA, 259 bp, Glycine max
  Clone ID: 700906664H1
attatttcttctttatgtctccgttttagttgctatggaaaatactaagaagcgagaggtgagggagggtgaagatgacgacgacaaccctgaagatggagaagttttacgcgctgttaaggagcttccgagacgcgcgtgatcggcggcgaagggagttggaaaaagaaaaacacgagagccgccacagctggaagaagatgaagaccaccgccgcaacaaccaaggacaataaatcacaagtttcttttgaatttca

SEQ ID NO: 89247 - DNA, 243 bp, Glycine max
  Clone ID: 700906667H1
tatagtttgaatttaattgccgagacatttaattggagtgatgatgcctaggcttgtgagctttccttgcttgcaaattgtgtagatttgttgttggttcattatttgtggatttcagattcatttttagtaggtttttggattgaagggcacattcctgctgtccccttaacgttgttcaaaaagctttgcctaaagattttgtttccccctcaaaaacaaatgcaaaagccattgtatgaa

SEQ ID NO: 89248 - DNA, 239 bp, Glycine max
  Clone ID: 700906669H1
gtgccagctgaaggaaggtgatgttgtggccaagatgccaaaggaagcttgcatcaccacaaagaccagtggggcacgtaagatcattgaagaggctggtttggatggtcatttggggcttgcatttgctatcatgtatgagagaagcttggatggggactctccttttgctggctaccttcaactcttgcctcaccaagagtgtgtgccaattgtttggaccctcgatgaagtaaacg

SEQ ID NO: 89249 - DNA, 160 bp, Glycine max
  Clone ID: 700906670H1
catcgaacagttgggtgatcaccgtccaccgactttgcgttgctcgctccctactctgttatgctgctccttactttctgatttcaagggcttaaaccctaaaaaggacccacggcgagaagcttccaactcctctctcacgagcggatctccacctccg

SEQ ID NO: 89250 - DNA, 170 bp, Glycine max
  Clone ID: 700906672H1
aacctcttcgttccttcgattcattccatttcttccacaatggcaacagacacagttcgcgttctcgtcactggagccgcagggcaaattggatatgctccacgtccctatgattgctaggggagtgatgctgggtcctgaccagcccgtgatcctccacatgcttgaca

SEQ ID NO: 89251 - DNA, 246 bp, Glycine max
  Clone ID: 700906674H1
agaaaagaaagagaaataagagagagaaagttcagaagaggcatcaattgctagctccaatatattacaccactgcaaaatccactgcagcagagatcattgttcattatcacagaaatgggtgaagagaacaaggaagaagaaaggaaagaagagaccacagaggaaaagaaggaagaagagcaaaaggatgaagagcccccagagatagtactcaaggttgatatgcactgtgaagcttgtgca

SEQ ID NO: 89252 - DNA, 249 bp, Glycine max
  Clone ID: 700906676H1
atctgctacggcggcatgatcttctcctacctcgtcactctcccccacgagcgccgccacctcctccacgcccaggagcacgatcagcagcatcactgattccatccaccttcagcaggatcctggttgaattggacgaggcccatttgcttgatctttgttttaaaatctgaaaaatcaaggcagaaagatactgtcagcttctgtgtatttcatcatttggatgataaaataagttctatttgatac

SEQ ID NO: 89253 - DNA, 135 bp, Glycine max
  Clone ID: 700906677H1
cggctcgagctcgagcgaattcggatcgagcaagccacaaattagtactctcgtaagtccccttgctcactgctaattgggcacaatggaaaagcttcatgctgtgtgcatcccatacccagcacaaggccacat

SEQ ID NO: 89254 - DNA, 249 bp, Glycine max
  Clone ID: 700906678H1
ggacggctgctacaatgcttgtaaagaggaggacttattgccttgagatgaactcattctgaagcgtttgtgagggaatgcagaatcatttgaaaagggagaaaatgttaagttcttcatagaagggaatcacaaaactcaaattttcttgggcggacatgaagtggaagcagcttggtcgctggaatcttgctctttccagcttctgaaactatggcccacatttgagtagttactaaaggagctgca

SEQ ID NO: 89255 - DNA, 253 bp, Glycine max
  unsure (1)..(253): unsure at all n locations
  Clone ID: 700906680H1
ggcggcatggcattctcagcagtctggcgactagcgaatcttgggcgacacttggatttgagtgaatcagtgaacaaggctccaccagttgggtcaatcaagttgaaggtagcttcagaggtttctgaagcattatcactgggtcgtgctgttgttgctcttgaatctaccactatttcgcatgggatgccatatccccaaaatttggaaactgcaaagacngtggaacgtattgcaagagagaacggtgcag

SEQ ID NO: 89256 - DNA, 248 bp, Glycine max
  Clone ID: 700906681H1
acagtattcttttttattgtgtttttcttctgcagagaagagtccccccctaccccccgctggcgaaggcttgattccctgcttcaatcgcattatcgttgagaaaatcgtccctcactccaagacaagcgccggcattctcctccctgagaagtcctcccagcttaattccggtaaggtgatagcggttgggcctggatcacgtgaccaggcagggaacttgattccggtgtccgtgaaggaaggtg

SEQ ID NO: 89257 - DNA, 233 bp, Glycine max
  Clone ID: 700906683H1
ctgaaatgggttctttacaagaaagaatcagttctaccacacaacggccacccccttctattcacacagtttatgtacccgcacacgatttaaccgatcctgcgcctgctacgacatttgcatctttagatgctactactgcactatcaagaggattagcggccaaaggcatctatccagcagtagatcatttagattcaacctcaactatgctccaacctcgaatcgttggc

SEQ ID NO: 89258 - DNA, 243 bp, Glycine max
  Clone ID: 700906685H1
aaacgactccaagtaccgccctcgctgctccaccatcctttcaatttgttctgcataggttatgcgctatgcaacacagtgccatggaagcctccaaattcagtaacagtgatcaaaacgttcgatgccataactgcgcaggacccctttccaaagacatggaaaccagtcactggaccgcttcgcctctcattagggatagcttctccatgattggttctgccgttggcggcgtggcaagtg

SEQ ID NO: 89259 - DNA, 245 bp, Glycine max
  Clone ID: 700906690H1
gtcacttaatgttgagatacccacatatccaccctccacccccccacaccgtacaacatgggaacgttacacagtagaagatgcatatgaaattgtcaacttcgacaaaatgagacgcataaatgtccacgcaccagtggatgtccctggtcatgcagaatcatggggtgctggatatcctgatgtttggccatcaccttactgtagggagccacttgatgtttcaaagaactttacttttgatg

SEQ ID NO: 89260 - DNA, 247 bp, Glycine max
  Clone ID: 700906693H1
ctgcaaagggcttctccagcctagtttgttctcagatcttcttcttccatggaccagtacgccaccgcggcgcagataggcgagggaacatacggcgtcgtttacaaggctcgcgaccgcgccaccaatgagacaatcgctctgaagaagattcgcctcgagcaggaggacgaaggcgttcccagcaccgccattagcgagatttctcttctcaaagagatgcagcataggaacattgttaggttgc

SEQ ID NO: 89261 - DNA, 251 bp, Glycine max
  Clone ID: 700906695H1
cataaacgccgcccaaaaccatttatagggttttattttctttgccaagaaaatgagagagtgcatttcaatccacattggtcaggcccacatccaggtcggaaacgcctgctgggaactctattgccttgaacacggcattcagcccgatgggcagatgccgagtgacaagaccgttggaggaggagacgacgccttcaacacattctccagctacaccggcgccggaaagcacgtgcctcgcgccgtct

SEQ ID NO: 89262 - DNA, 253 bp, Glycine max
  Clone ID: 700906696H1
acttttgttcggtaggcctttgttgtcaccaatgccaccattgtactcgtgtccctttagcaagtctaacctagtggtcagttgctattgcctttgccagagccgtcacaccgatcgctagagttgccgtcgaaattgtcattgtttgactgttattttgttgttttcacctaaagattccacttctactttttcctttcttggtgttagtttgggggtttttcaatcctccatttacgcaaatatagacggt

SEQ ID NO: 89263 - DNA, 235 bp, Glycine max
  Clone ID: 700906701H1
gccccatcaaccaggttatttctgctcggaagggagagtttgaaactggatacgagagaggtggacaaactcgtgaacatgtccagcttgcaaaaacgctgggtgtgtctaagcttcttgttgtcgtcaataaaatggatgagcctacagtgcaatggtcgaaagaaaggttctctgactttctcactccacacaacatacgagtttgcgaaatggggatatgctgagatacctg

SEQ ID NO: 89264 - DNA, 275 bp, Glycine max
  Clone ID: 700906702H1
tggaagacaaaacacaagacagagtcattcagcaaggcttgaaacgagaagcgaggatgcccatcagatgtattctgcattggcaaccgaaccaaggtagcgttgtgaacagccaagtcctgaatgagatctcgcagtgcgtcgaaagccttaacggcgtcaaagaaggaagatgcaaagcctccctcactttctacagacccaatgtacgagatcaatcggtgaccatcgattttcctcgcgattttctggggatatcgatgctggagcagccg

SEQ ID NO: 89265 - DNA, 272 bp, Glycine max
  unsure (1)..(272): unsure at all n locations
  Clone ID: 700906703H1
cgcgccttcagattggtcagttggaagcaaagcacaaagccttagacagactctacgatgttatgaaagaggatgagaagaatgttttggctgtttttggtaggagcaatatttctgctttagtccaattgctcacagcaacatatcccangataagggagaagacagttaccgttatatgctctctcgtggagtcagtgagttgtgcaaagtggctaatttcggaaggagttctgccacctctcataaggcttgtcgaatctggtagtgct

SEQ ID NO: 89266 - DNA, 273 bp, Glycine max
  Clone ID: 700906704H1
gaggattggtcaagtatcccttcattgccgttgaaagtagtcaggagaagatttagtgtcaaatgtagaaataaaatacacagaagaaaaaaagaattgaaaaagataaactttgcagattggtctagtctccctcgaggtatacttgagatggttgctgaaagactgacctttatcgattgcttatcaatcagcaaagtttgtacaagttggaatagagttcttggtgaagaacttcctaggtggcaaaggcatggatttccttggctcttg

SEQ ID NO: 89267 - DNA, 272 bp, Glycine max
  Clone ID: 700906705H1
aggggataacacgaattgaccacagcagtcttagtggtgttgggaactctactagaaatctgcctgctactgagatgccaaaacaagggaaacaggctcaggttattcatggtttgccagattttgctgatgtttacagcttcattggaagtgtttttgatccagacacagaaggccatgtccagaagctgaaggaaatggatcctataaattttgaaactgttttgttgttaatgaaaaacctcactgtcaatttgtctagtcctgacttt

SEQ ID NO: 89268 - DNA, 269 bp, Glycine max
  Clone ID: 700906706H1
caaagtttcaatctttgtattcaattcaccctttctctctctccctgggccacttgtgttgatgcctcaacccctctttctcggaaaccagccgggtcccaatccgatgatcattcctttaattacatgaaattctgccgaccctctttctctgatcgcgttccctgcatgcccatttgcaagaatcgcgacaccgccttcacacgtgtggaggtttttgacacacgtgtggagaatcatgttgaggttgacgttgtagagggtgttga

SEQ ID NO: 89269 - DNA, 264 bp, Glycine max
  Clone ID: 700906708H1
cgcgaagagtcgagggttgccgttgatttggaatctgtggcgacgcacgagataggtcacgtgcttgggttgggtcactcttcggtgaaggaagcggtcatgtacccgagcctcagccccaggagaaagaaggttgacttgagaattgatgacgtggcaggagtccaagctctttacggctctaacccaaactttacttttagttctttgttgcagtctcagaattcattaaacgctgccgttgggttggaaacggtttctata

SEQ ID NO: 89270 - DNA, 259 bp, Glycine max
  Clone ID: 700906709H1
aggctcataaatcttttttatgggtttcagggtcactactactctgtctctgctctccctgttttggctcttgtccctgcaccaagcaagagctgcaaagttccacaatgtgagtggcttgagagggaaaaagccagttgtagcaaatgggtgcaatttgttcctgggaagttgggtggttgacacgtcttatcctctctatgactcttcaacatgccccttcattgatcccgagtttgattgccaaaagtatggaaga

SEQ ID NO: 89271 - DNA, 270 bp, Glycine max
  Clone ID: 700906710H1
cttttagcaagttaacaacacttttgtcttcgttccattatctagttctcaattctcttcaccctttgcctttgaaagaaatgggtagtcttgaagcggaaagaacaacagtaggattggcagcaagagacccttcagggattctctccccatacacctacaatcttagaaacacaggccctgatgatgtttacattaaagttcactactgtggaatttgccattctgatctccaccagattacccatgatcttggcatgtccaactatc

SEQ ID NO: 89272 - DNA, 268 bp, Glycine max
  unsure (1)..(268): unsure at all n locations
  Clone ID: 700906711H1
gtcagaagggtgcatcaggtcncgagacaggatgagaactccatggctatcactcctgttgttccaagtgacgaagagattgttgatgttaagcctcttcaagtttctagagatattgtgcatattcctggtccaaagaggtctaatttaagtttggataagcttataatggaagcaatcactagcttgaaggagaatggtggttctaataagacagctattgcagcttttatagaggaccaatattgggcactgccaggcttaaaaa

SEQ ID NO: 89273 - DNA, 264 bp, Glycine max
  unsure (1)..(264): unsure at all n locations
  Clone ID: 700906712H1
attccgaagtccaaataagtttctatgtctcagttccagacagtgtaagatctccgngtgnnatcttagctattctagcttctgttgtgggaagctaagcaatcatcagtggaacattttctatcataaaccagagctaatctctgggttgcttcccaagagttaaggttgttcatacatctgacaagatacatggtcaggtctacatccctgaaattaattggttactcatgatcctctgcattgctgtgaccattggattta

SEQ ID NO: 89274 - DNA, 265 bp, Glycine max
  Clone ID: 700906714H1
ggcttatggtggatacctaggcacccagagattaggaagggcgtagtaagcgacgaaatgcttcggggagttgaaaataagcgtagatccggggattcccgatataggtcaacctttcgaactgctgctgaatccacgggcaggcaagagacaacctggtgaactgaaacatcttagtagccagaggaaaagaaagcaaaagcgattcccgtagtagcggcgagcgaaatgggagcagcctaaaccgtgaaaacggggttgtggg

SEQ ID NO: 89275 - DNA, 272 bp, Glycine max
  Clone ID: 700906717H1
acgcctcttttgctggtcattggccccaactatcattcaagcatatttatggccagagagcactggttcctggttctattatcatcgatggtggttctggctattgcaaatttggttggagcaaatacgcatatccatcagggcgttcagcaacatttttggaatttggtaatattgagtcaccaatgtatactaggcttcgacatttttttgcaactatttataacaggatgcaggtgaaaccaaataaacaaccagttattgtttctgtg

SEQ ID NO: 89276 - DNA, 270 bp, Glycine max
  Clone ID: 700906718H1
tcgggtataaagcagcaggtgatgccttggagttagttaagctttgtgaagagtacgggatggaagcttacataataaaatctgttatggacaagaatcgtttttctgctgatatgaattctgttaccaactccaaagagaggggacaggtctcatctacacgtgttcgtgaagcccttgccgtaggggacctgaagtatgtctcagagcttttggggaggcctcatcgtctcatattaatggccactgatcaagaaagattcagtactg

SEQ ID NO: 89277 - DNA, 106 bp, Glycine max
  Clone ID: 700906719H1
tttacattcggacacgataacaacagcgacatggattaaggtggcacagtggcagctattattgaattgttgaagagaaacctgaaactacaatttcacccaccct

SEQ ID NO: 89278 - DNA, 271 bp, Glycine max
  Clone ID: 700906720H1
cgacaaacagatagtgtgggagagagaagagcggaagagaaaatgacgaccaggttcaagaagaacaggaagaagagaggtcacgtcagcgccggacacggccgtatcggaaagcaccgcaagcatcccggaggtcgcggtaacgccggtggcatgcatcaccaccgtatcctcttcgacaagtaccatcctggtttcttcgggaaggtaggcatgcgctacttccacaaacttcgcaacacattctacaatccgatcatcaacatcgaca

SEQ ID NO: 89279 - DNA, 268 bp, Glycine max
  Clone ID: 700906721H1
cgcgattatagtcttcgctaggcgtggttgttgcatgagccatgttgtgaagcgattgctgctgggtcttggggtgaaccctgcggtgcacgaggtggaggagagtgatgaagtgggtgttgttagagaattggaagcaattgtgggtgccaataatggagggaataagatgcaatttccagcagtttttattggtggcaaattgtttgggggattggataaggtaatggctactcatatttcaggggaattggttccaattctcaaa

SEQ ID NO: 89280 - DNA, 268 bp, Glycine max
  Clone ID: 700906722H1
cgtcaagtgtttctgtttctgttttaatggagataaccaaacttggcaagagatttcaaggtaaggtagctattgtgacagcttccacccttggaattggctttagcatagcagagaggcttggcttggagggtgcatctgttgtcatctcttctcgcaaacagcaaaatgttgatgaggctgctggtaaactgagagctaaaggaatcgaagtattggcggttgtttgccacgtttcaaatgcccaacaaaggaaaaatttgataga

SEQ ID NO: 89281 - DNA, 267 bp, Glycine max
  Clone ID: 700906724H1
tgaagaacttattcaagctacaaatgtgaaccatgatcttgaactacttacaccaccaggctctgatggagaatatacaaaatcatggttcacatatgaagaacttattcaagctacaaatgggttttcagcacaaaatttgttgtgagaaggtggatttggctgtgtttataaaggtttgctgatagatggaagagaagtagctgtgaaacagctcaaaattggtggtgggcaaggggaacgcgaattcagggcagaagttgagat

SEQ ID NO: 89282 - DNA, 266 bp, Glycine max
  Clone ID: 700906725H1
gtttacatcaaaatgaagaaacccaatgctgcgatccgtgatgctaatgctgctttggagattaatcctgattctgctaaaggatacaagtcacgtggcgtagacgagcaatgcttggtcaatgggaagaagctgcaaaggatcttcatgtggcttcaaagttagactatgatgaggaaataaatgctgtacttaaaaaggtggaaccaaatgctcacaagattgaggaacaccgtcggaagtatgaaaggctgcacaaagaaaga

SEQ ID NO: 89283 - DNA, 266 bp, Glycine max
  Clone ID: 700906727H1
ctcacggaggcagcagtaccaccgtgcaccacgtggctcacgagtctcaccaccacaccccccattccgctttctcctcccacaacaacgcaccctccaccactgttcattccctgagccaccaggttaacaccggtggtctctcgaccaaacccactgtcagggttttcaccaaagctaatcccaatttctctctcaccattcgtcgcggccaagtcattctcgctccctccgatcccaccaatgagtaccagcattggtataag

SEQ ID NO: 89284 - DNA, 264 bp, Glycine max
  Clone ID: 700906728H1
gcttggacgagtgaattagattcatcatcaagatgtcgtctctgatagcagaagatgtgaagagcagatcacaggtgtaccacggggtcgaaatgtgccaagtgaagtccaaggagcttctcatggaaatcgccctccccaacggccttcttcccctcaaggacatggacgagtgcggctacgacagacaaaccggcttcgtctggctcaaacaaaagaagagttacacccacaagttcgacaagatcggaaagcttgtctcct

SEQ ID NO: 89285 - DNA, 260 bp, Glycine max
  Clone ID: 700906730H1
gaacattgcacctgcaacttcaacttcacttctccgttctaacactcgccttgttccttatcaagacatggagacagacggctttcggtgtttttgggtacctgaatttcaccaaagctggcttccttgatcattctaagaaattcaacccagaggacatggtattacgaataccagggaagaattgcattgttactggagctaactctggaattggctatgcaacggctgagggtcttgcaaagcgtggcgcaactgtc

SEQ ID NO: 89286 - DNA, 262 bp, Glycine max
  Clone ID: 700906731H1
caaaccgttcatgcttaatcaagttgggaacaacaaaaaaaatcaaaacaatgtttctgggtttcggtttcatttcatcaagatgatctgtttatctttttttttttaattttaatttaaagtctttgtattttgtatgtaaagatgtaaaattatgattattaggtggtgcatgtgttgcgtcatgggccaatgttatcctctgcttttaagttggaagaggcccagctcacgtgtgatgtacggctgtgattgtgtaatt

SEQ ID NO: 89287 - DNA, 261 bp, Glycine max
  Clone ID: 700906732H1
cttcattgtagatctattgggcaaatggaaggagtctgaatatggaggtggtcagtctgttcctgttggtggtattgcatactacatcactgcaccttccagcttagctgatatggcagccaatcctttccatgcattattctaccttgtgtttatgttgtcagcctgtgccttgttctctaaaacttggattgaagtctctggttcatctgctagagatgttgcaaagcagctgaaggaacaacaaatggtaatgcctgg

SEQ ID NO: 89288 - DNA, 268 bp, Glycine max
  Clone ID: 700906734H1
cgggaaaagaaaggccaagagagtcgagaaacggcactctcatcgtcgcgcgcaccctctactctgatccagcgactcctaattaagttgggaacataaaagacttcaaatttccaagatggctgcaatctttgcttccagatgctctcgtgtgagttctatggtaatggagccctgaatcttatttttgcggggaggggggtggagctggattgttgaatatgatgcagccactaatttggtcgcactggtacaattggcagtaaaa

SEQ ID NO: 89289 - DNA, 97 bp, Glycine max
  Clone ID: 700906735H1
ccttactctccagcgcctactcatatcacagatcatggataattcatagtactactatttcgtacaagtattcacgaaccattccattccaatttcc

SEQ ID NO: 89290 - DNA, 264 bp, Glycine max
  Clone ID: 700906736H1
tttggtttgagcaatgcaggatttcaggtgagcaagtatatgccatttggaccagtggagactgttatgccatatctcctaagaagggctgaagagaatagaggaatgttggctgcttcgggctttgacaggcaactgatgaggaaggagttgggaaggagactaaaagctgctgtcttttaattttttatacttttatgggacgagttaatgagatgtaataatgtcttttaggcaacacaggattaggatactctttgtaca

SEQ ID NO: 89291 - DNA, 268 bp, Glycine max
  Clone ID: 700906737H1
gtcatttttttctcatgcatgacagccttcatgaaggagaccttacaaaaaggcgctccaacgctgtgaataattccaatctgtttaagttggctatcaagcgcaatttgcaggtctatatatgcgatcagacatttgatcccactcagttttatgcattaggccgtccttgcccaagactttgtagcaatgaaaccaaagaaagcatacacttctgtttaaattctgttaaggaacaaggaaaagtaactgaaacccaatgtaacaa

SEQ ID NO: 89292 - DNA, 276 bp, Glycine max
  Clone ID: 700906013H1
ccaagcaactatagtctggttgcatggcctcggggataatggctccagttggtcccagctattagagacccttcctcttccaaatattaaatggatatgtccgactgctcctactcagccaatatctatatttggtggctttccgtctactgcttggtttgatgttggagatatttcagaagatgctcctgatgatctagaaggtttggatgcttcagctgcacatgttgcgaatttgctgtctacagaacctgcagacattaagcttggtgttgg

SEQ ID NO: 89293 - DNA, 276 bp, Glycine max
  Clone ID: 700906014H1
tctatactataggtctcgcccaatacctactctccgctcccaagagcacgcaccaccactattgcacttcttcctcgttctccctctttttcttcttcttcgctaaacccttttttctatctcactaacacaacaatgggagacgagaagaagggcaagcctgctgcttccggcgtgtggtccaccatcaagcctttcgtcaatggtggagcctccggcatgctcgccacctgcgtcattcaacccatcgatatgatcaaggtgaggattcaactt

SEQ ID NO: 89294 - DNA, 279 bp, Glycine max
  Clone ID: 700906015H1
gttctagatcgcgagcggccgctcgcgatctagaatagaaaaaccatggtgtcaccaatctcacttattgtcctcttgttatcagtttcttaggcagattcagcttcagttcaagaaagttttgtccaatgtctcaacttgaattcggacaaaacatttccattttactcatcaatctacactgcaagcaacccttcattcaccagcatccttgactcctccgcacagaacctaaggcttttggtgccttcagtgccaaaacccgagttcatattcaca

SEQ ID NO: 89295 - DNA, 270 bp, Glycine max
  unsure (1)..(270): unsure at all n locations
  Clone ID: 700906016H1
ggagttgcaagcatgaatgttactcttggagttcctcgtgtcaaagaaataatgaatgganacaaaaaaatcagtacaccaattatcactgctatacttgagagggatgacaatgcaaatactgcaagaattgtgaaaggtcgaatagaaaaaacaaatttaggccacgttgcaaagagtataaaagttgatatgacttcaagatcagcatcagttgttatcacccttgacatgaaaagaatccaggatgcacatctaaatatagatgct

SEQ ID NO: 89296 - DNA, 285 bp, Glycine max
  Clone ID: 700906017H1
tcggctcgagtgcatctttagctgagatggtgtgtgaggacctgccaaaggaagtgtgtgctttctcattagcttcatcagggaagaggtgtttgttggagaccgagaaggtggccgacggttgcgtcgagtaccaatgccggacgtcggaagtggtggtggagagaatggcagagtacatagagacagaccaatgtgtggaggcatgtggggttgataggaactctgttggaatttcatctgatgccttctttgagcctcaattcactggcaagctttgctctc

SEQ ID NO: 89297 - DNA, 273 bp, Glycine max
  Clone ID: 700906018H1
agacaattcaacttaagagatcaatatggccaccaccactacccagcctccctctaatatctgttttttccttctgttgttgcttctagcacactttcatttgggcataagccaacttgagctgaattactactctaaaagctgcccaaaagctgaagagatcatcaaggaacaagtcacacaactatataacaagcatggaaacactgccgtttcgtgggtcagaaatctcttccacgattgcgtggttaagtcatgcgatgcatcattact

SEQ ID NO: 89298 - DNA, 266 bp, Glycine max
  Clone ID: 700906019H1
atcattatctggaactaccagcttggtagatgcaacagcaaggcttactgctgctggaactcttgggaaagcagttttagatagatcagaatcatccatttcaaataattctgatgatgaggtgcaccgatactggcgatgtcagctcccggatgatattacccctgatttcaaggtcttgggagaagatgagtctcgagttcttgatgatatttctttagcaggtttatctatacatgatgacaatgaagcctccaggtttcctt

SEQ ID NO: 89299 - DNA, 270 bp, Glycine max
  Clone ID: 700906020H1
tagggaatcaagaaaattattataccctttaagatgaaaccgtacctacgtgcaatattcctattattccttatccttctcgaccaatccatttcggcgagtgcttttttaaatttaaatggattgctaaacattgaaaagtggccctctggcgagaaaagtttggaaatgggaaagatagggaaggagacgacagatcatatcaaagaccttttaaagaaactgattgagtcccctcccgaaccaccgaagcaaatcaatattgaagtt

SEQ ID NO: 89300 - DNA, 267 bp, Glycine max
  Clone ID: 700906021H1
gttgaaaacacaaaagataaaaaatgggttcttctctgtggacctgtctgattttgttatcacttgcttctgcttccttcgccgccaacccaagagcaccaattgatgtgccatttggcagaaactatgtgcctacctgggcctttgatcacatcaaatacctcaatggtggttctgagattcagcttcatcttgatgctgctcagtggcaaaaactctcctgggttcgccagaaatacaccatctacaactactgtgctgactgca

SEQ ID NO: 89301 - DNA, 267 bp, Glycine max
  Clone ID: 700906023H1
gagattcttcgttacatatattaccaccagaacaaagatggaggttggggactacacatagaaggtcacagtatcatgttttgcactacactcaattatatatgcatgcgaattcttggagaaggacctaatggaggtcataacaatgcttgtgctaaagcaagaaagtggattcatgatcatggtggtgcaacacatataccttcatgggggaaattttggctttcggtacttggtatagttgattggtgtggaagcaacccaatg

SEQ ID NO: 89302 - DNA, 267 bp, Glycine max
  Clone ID: 700906026H1
cgttgatgctgatacaactgataggaagattcaaaagaaggtgcgagaagcacaattagcacaatacaactacatcttggttgttggagaggaggaagctaatacaggacaggtgagtgtacgagttagagacttggcagaacataaggttatgagtattgagaagctacttgaacatttcagagacaaagctgcagctttcgaatgatactttgcatgtgaaaactgtcgaagaaaattttcagccccaaataccttagttttaca

SEQ ID NO: 89303 - DNA, 196 bp, Glycine max
  Clone ID: 700906028H1
cagggaagactctaatcttggaggaggaaagggtggatgcttgatttgctagttttggttttatggatgttttagagacattgttatttacctttgttggttctgtgctttacttttggttttgatagacggtggtatgtctctgtatggattttgattgtttcaagttttaatttaattgactgtagttttgaat

SEQ ID NO: 89304 - DNA, 273 bp, Glycine max
  Clone ID: 700906029H1
ccagagtagagtagtgcggaagaaaagaaaaacgaaatccctcgctttgagaaatgggtgtattactcttccggtgggttctgccactgactctgttgctcacttgcgcgttaggtttccaatcggacgagcttctcctcgacgaccaagagttcggcatcgagggaggacgagcctccttcgattccgattcgcacccatctcccacctccaccttgaggaagagcttttctgactcctcctccgactccaagatccacttccctctccaac

SEQ ID NO: 89305 - DNA, 270 bp, Glycine max
  Clone ID: 700906030H1
cacgggtgcggacaacggcgttgcgtataatacagttacggattccgggtcaagttcaggatccggaggagaaacaatgctcgcagatgggtcatatttagctggtttagccatgggagactcccctgaaagaacagtttccatcgcgtttgtttactctgctagctttttgcttattctcttcctgctttagctgcaccagcattgtttgttaaatgtgtaaatggctcttagattttcgggtttttcgtgggtgggttcaagaatttg

SEQ ID NO: 89306 - DNA, 274 bp, Glycine max
  Clone ID: 700906031H1
atgaaagcgaaacctagctatcatcatcatcacagaagaacaacaacagaggaaaaaagaaaaagaaaaatgttagaggtgaagagaatcggtgtggtggggagtggccaaatgggatcgggaatagcccaagtcgctgccatgcacggcatcgacgtttggcttcacgacctcgaccctcaagctctctccaaagcctcctcttccatctcttcctccatcaaccgtttcgtttccaaaaaccacatctctcaggttgcgggtgctgatgctt

SEQ ID NO: 89307 - DNA, 275 bp, Glycine max
  Clone ID: 700906033H1
ccactactctgttcctcagattcaacaccaccttgcgtggcgccaatgggaaaagccttcgacatcggagccgttccgttcaacgccgacgggtggggtccgccggacaacgcgacctcaggcagcaacaacaacaacctccctctgaacgtccccttcgcccccttctcccgctccgacaaattgggccgcatcgccgattggacccgcaacttcaacaatccgacccgctccaagaaccccgccgatgccgtcttcgacttcgccaacgacga

SEQ ID NO: 89308 - DNA, 273 bp, Glycine max
  Clone ID: 700906034H1
tctcgagccgaatcggctcgagaccctcccccaaagccctcagcacttgtctcaacctctaccttgattcgaatcgcgtagatttagcgcgaaaattgcttctacacgccaaacgggatttaactcgtaagccaaatgtgtgtgtgtttaatatcttggttaagtaccattgcaaaaatggggatcttgattctgcttttgagattgtagaagaagcgagaaactctgagttttcttaccctaatttagttacttactcgacccttatggacg

SEQ ID NO: 89309 - DNA, 77 bp, Glycine max
  Clone ID: 700906035H1
gttttcttgtttttattgtgtctctcaatgagagattgtaatggaaaaggatcatcaaagtctgtccaaggaacata

SEQ ID NO: 89310 - DNA, 266 bp, Glycine max
  Clone ID: 700906037H1
atcactgtatgctcattgtataggttacatggttggtaccgcaactttatctcacagattaggtggcctttactgcttctactgtctttatgagactcaaccatttaatccttcttttaaggtctatctatcccttggagaattaaagaaacttagaatccttgttgctgatgcaaaagcaaatgatattaaagtagcacttgctttagtaaaaagaatgcttgaaagaaacacattcctttttggctctgttgacttgatggaag

SEQ ID NO: 89311 - DNA, 267 bp, Glycine max
  Clone ID: 700906038H1
gtaaaaccaatcacaaagtttccatgggaatcacgaaccactcccccagcactaacctttaaggagttgcaattcacagccccatcatagttcaacttaaacaaaccttcaggaggcggactccacctaattccatttggataagacgtgatctcttccatgagacgaagaataaccatcaaggctccatcgctctatccaaactattcattaagaaatgaacctgctatactacaccattggctgctaaccaatttttattaaaaa

SEQ ID NO: 89312 - DNA, 264 bp, Glycine max
  Clone ID: 700906039H1
atcatgatcagtgtgaagcaattagagaagccagaatactgggctccattggatccaggaagaagagcagtgatagtcatctccaggcaaccaagcagcttgaacatgagcttatcaattggacattccaattctctggctggataagtgcccagaaaggttatgttagagcattgaataattggctgttgaaatgtctcctgtatgaacctgaagaaactccggatggcatagtccccttttcccctggtaggattggggctc

SEQ ID NO: 89313 - DNA, 81 bp, Glycine max
  Clone ID: 700906040H1
agaccttaaagtaccaaacttccaactcttctctcttctctcttcactcttcactcttgtcgtcatttccacacaacatac

SEQ ID NO: 89314 - DNA, 267 bp, Glycine max
  Clone ID: 700906041H1
cttcaagaacctcataaaaccctttctctctctctctctctagatctgttcaaatccgaaaccatttccgctctaatttccaagagcaaaccctaatccgctctctctgtatgatactagatttcccctcctcaaaggcgtagttttgtgtcgatttgtaaattcattcggtagtttaggttagaatttttgtgtcaagtttttagggttttgaatcggtgagatgaatcacaacaacagcaacaacaatagagcgaggtaccctcc

SEQ ID NO: 89315 - DNA, 266 bp, Glycine max
  Clone ID: 700906042H1
gccaaggagaaaagaaaaaaaaaaagaactggactccttcaattagtgcattgtttcttttcttcaaatggtagcaagaagacattgttaatttgagagatggcgagttacgaggctattaagaactttgatgatgatgatgatgatgatgatgatgtggagatggcactcccccatagccagatctctgaatcaagatctgccactgtttcttcccccattggccaaactaccccgcttcacattcacaacattattgaggaaca

SEQ ID NO: 89316 - DNA, 266 bp, Glycine max
  Clone ID: 700906043H1
ctatttccgaagtggctgaaccagtgcaactattgcatctaagacaagaactttttgtcgaactggtacaagtcctgaaggatcaaatttcacagaagacatcaaaggcgacccttcaaaccctgatccaattctctccttgggggaggaacaggatcagagctgtggaagcagctgctgttcctgttttgattgagcttcttctcgattgcaaggagagaaagccttgtgagatgatgctggtgttgttggagctgctatgccag

SEQ ID NO: 89317 - DNA, 268 bp, Glycine max
  Clone ID: 700906044H1
cagcaatgggtggggagcgcaacaaggttttcactttggccgaggtctctcagcacaacaatgccaaagactgttggcttgtcattcatggcaaggtttataatgtaacaaagtttttggaagatcaccctggtggggatgaggtcctgttgtcttccacagggaaagatgcaaccaatgattttgaggatattggtcacagcaccagtgccgtagccatgatggatgagttctatgttggagacattgatacatcaaccatccccag

SEQ ID NO: 89318 - DNA, 88 bp, Glycine max
  Clone ID: 700906045H1
atctggattgagcggggaagtggaacaaagacgaggaggatcagcgcgcgtggaggctatacgtaggctacaatgagctccacgcgct

SEQ ID NO: 89319 - DNA, 267 bp, Glycine max
  Clone ID: 700906046H1
cggagtgctgattccaatcctggccgttcatcacgatcaagcgatatgggggaaggatgcgaacgagttcaatccggggcggttcagagaaggggtgtcaagagcgggcaagcatccattgggcttcataccgtttggagtaggtgtgcggacatgcatcggacaaaacctggcgctgctacaaaccaaactcgcccttgcaatcatactccagcgttttactttctgcttggcccctacttatcagcacgccccaaccgtcctcat

SEQ ID NO: 89320 - DNA, 251 bp, Glycine max
  Clone ID: 700906047H1
tcttaacacaattaacaaagatatatcatatcatatcaactccaaatgatgaaaaatattgggttgtttcttcttgtggtggtggctacttttgtggtggcagccacagctggtagcttttaccaagactttgaaataacatggggtggtgaccgtgccaaaatctatgaaaatggaaatcttctaaccttctccctagaaagagcttctggtcctggcttcggttccaaaaaggattacttgtccggaaa

SEQ ID NO: 89321 - DNA, 280 bp, Glycine max
  Clone ID: 700906050H1
ctcttattcatccttctcttctgaataatccagatctctttctgcccttttctccgtcacgcttttcgtgaccggatctgtatggatttgatccagatctacacgccgatggtggttttggcccggtctttcatagatctggtgcgtagaggctcagatctacggtaccgaggtacaacagagaatcgatgacaagaacgcagatccgacggtagatccagccgattccgcttgttcgatcgctacagacccctgtatcggatcattaagcagcgtgtct

SEQ ID NO: 89322 - DNA, 265 bp, Glycine max
  Clone ID: 700906051H1
ctgaaatctgaagctaacttaagggaaatgagatggccaatggcaacactagtcatcgcttcaagctcttgcttttccttctaactctgcactcttcattcgctgagattttcttcgaagagagattcgaagatggatggaagagccgttgggtgctatccgattggaaaaggagtgaaggaaaagcgggtaccttcaagcacacagcaggaaaatggtctggggatcctgatgacaaaggtcttcagacatataatgacgccaa

SEQ ID NO: 89323 - DNA, 263 bp, Glycine max
  Clone ID: 700906052H1
gcactctgttcttatttccgatcatgagggcgcacaagaagggtgttaccgtggggatcactgttgctgcttcttaagcctttttcttttcttatgtgggttccccccttcccctttcggttttctgcactttagagagactaccagacatggctggcagtaaccaggtcaatctcaatgaatctaggagtgttgttccgttaaatacatgggtgcttatttccaatttcaagctgtcttacaagcttctcagacgtgacgat

SEQ ID NO: 89324 - DNA, 262 bp, Glycine max
  Clone ID: 700906054H1
aatttgcatgctcttcatctcatctgggaacccttcattttgaatctccattttatggatcgtcacagtcagatactctaaactcttgtatttccaagacgcagattgatttcacgacgtcgtaccggcggccacttcgctctctcttctttctcatcggaatttgcctaacgcaaggattcagaacactgatatgagacttgaatcgggaacttgcaatgtgtgctcagctccttgttcatcttgcatgcatcttaaccat

SEQ ID NO: 89325 - DNA, 256 bp, Glycine max
  Clone ID: 700906055H1
agcatattgatgctcttactgacaggattggaaggaatgttgtccttgaacttgttagcactgagattgatccaaagaccaaatctgcaaagaaaagtaatgaagcagtgctgaaggattggtcaaagaagtccaatcttaaggcagagagagttaattacacggctgaattcataattgactctagttttggggagccaggagctattactgtgacaaacaaacaccagaaagagttcttcttggatagcataac

SEQ ID NO: 89326 - DNA, 94 bp, Glycine max
  Clone ID: 700906056H1
ctcgagcgatatctgaaacaagctattgtagacaagaatccagtcgttgcaagtgcagccctggttagcggcattcatatactccacacaacat

SEQ ID NO: 89327 - DNA, 260 bp, Glycine max
  Clone ID: 700906057H1
ggggacttgattcagccagatggttatattccatggaacccaattgaaccaaacacacaggattgctacttcgctgagtttggcaacactggaccaggttccgttgctcaagcaagagccaagtttggcaaaggtctcattagcaagcaggaggctgcacaattcactgctgagccttggctccaagctagcacttggttgcctgctgctggcgttcctttcgatgctagcttcaccaaagcttaaggatccgagacaaa

SEQ ID NO: 89328 - DNA, 79 bp, Glycine max
  Clone ID: 700906059H1
atcccttttcagctttcattggtgtggcctagctgttttctcaatgagaaagccttcatctccgagaagcgcacttttg

SEQ ID NO: 89329 - DNA, 268 bp, Glycine max
  Clone ID: 700906061H1
aatttgtgcaaacacaatacacagatggatcagttcaaaggacagcctcgccttccgaaattcgtcgttccgaaacgctatgacatcaggctcaagcccgacctcgtcgcgcaccgttttgcaggttccgtcgccgtcaacctcgacatcgtcgccgccacctctttcatcgttctcaatgccgccgaactcgacgctcgcaacgacgccgtttcattcaccaaccaagattcctccaaggttattaaaccttctcgagttgagttgt

SEQ ID NO: 89330 - DNA, 257 bp, Glycine max
  Clone ID: 700906063H1
ggctggtggttatgctgctgggttcactggactcacagacatggctggtggttatgctgcatggacacaaaatggacttccaacagaactatgaagtgtttcttttggaactgcagctgtaaatagaataagttttgggaggagtcccatgcatgcaaatgcagaagcacttcaccaagacagtgacaatctgatactggaacatgtaaatgcagaaagagcggggggggcagtctcgcagatttcttatgcagact

SEQ ID NO: 89331 - DNA, 265 bp, Glycine max
  Clone ID: 700906065H1
gtgaatacgaattcaacagaaggaatctatgggtattggttgctatccaaaacgttgagtgatgcagtgggtgaggctgtgaaagctggcaccaagaagtttgcaacgaaaaacgctaccgtttttgggtctcaaagagtgcatactcttgttcagtgcacgccagatctatcaagcgaagattgcagtaagtgtttgggtgatattatgagagatattcctttgtgttgtctcggaaggagaggtggaatggttctatttccaa

SEQ ID NO: 89332 - DNA, 262 bp, Glycine max
  Clone ID: 700906066H1
cgaatatcttgttgtttggagcgatccgagaaaaactctgtaaacatgttggtttaccaggacctccttacaggtgatgagcttctctctgactccttccgttacaaggaaattgagaatggaatgctgtgggaagttgaggggaagtgggttgttaaaggagcagttgatgtagacattggtgcaaacccttctgctgagggtggaggagaagatgagggagttgatgatgcagctgttaaggttgttgacattgttgaca

SEQ ID NO: 89333 - DNA, 260 bp, Glycine max
  Clone ID: 700906067H1
gagctctagggttttcttcttgctcccgttcttcttgctctcccagggcggacaatggatttgtccaaggtcggcgaaaaaatcttgagctccgttaggtccgccagatctctcggattgctccctcccgtttctgatcgccccgaggttccagctcgagctgctgagacagctgctgtagctcgtgctcttgcagggttacctcctcatcagagatacagtctttcttcaagttcagaagaactaagttcaatatatgg

SEQ ID NO: 89334 - DNA, 260 bp, Glycine max
  Clone ID: 700906068H1
cattttcttcgtagccaaacactctgaaattctcagttatgtcgtggcaagcgtatgtggatgatcacctactgtgtgaaatcgaaggtaaccacctcactcacgccgctatcatcggccaagacggaagcgtttgggctcagagcaccaacttccctcagttcaaacctgaggaaataactgccatcaataatgactttaatgagcctggatcacttgctccactggattgtatatcggtggcaccaaatacatggtca

SEQ ID NO: 89335 - DNA, 257 bp, Glycine max
  Clone ID: 700906070H1
cacagaaaaaatgggttcttcttcttctatgtggacggtgtgtgtgattttggcatcactggcctctgcagcactctgtgccaacccacgcaggccagtggatgtacaatttggccgaaactacgtgcccacatgggcctttgatcacatcaaatatttcaatggtggttctgacattcagcttcatcttgacaagtacactggtactggcttccagtccaaagggtcttacttgtttggtcacttcagcatgtaca

SEQ ID NO: 89336 - DNA, 258 bp, Glycine max
  Clone ID: 700906071H1
ggttcttcggtgagagttagagagagagaagaaggcttttttcttcttttttttttcttttttgttggtttctcttgttcttttttgtaggtactgaggaagaaagaccaagactttatccgtgtgcttcacttagctcaagagcgtacaattcaggcaaaggccttgaagtcggagtgtgttaaggtttcttaggagttgctgctgtcttgactgaagaaatggaggtataagcttagctgctcagggtctaatata

SEQ ID NO: 89337 - DNA, 260 bp, Glycine max
  Clone ID: 700906072H1
gtttagcaataaccaaaccctctctactcttttttcttctccttctcttcgctagggttttagcttcttcctcttcacttcgttcttcttcgcctctacaatgagcttcgactaggacacattcaacgtcgccgatctcacttctgctctcaacgaggactatagagcagaccttgtcaatgctcttaagagcaagatacagagtttggctggacaacactcggatattctagagtctctgtcgcccaatgtccgaaagc

SEQ ID NO: 89338 - DNA, 259 bp, Glycine max
  Clone ID: 700906073H1
ggatgatcagagattctgagacacattatggtttcaggactaagagtgatggtgatggcatttccatctttggtagcagcaatgtttggattgaccatgtttccatgagaaattgtagtgatggactcattgatgccatcatgggatccactgctattaccatctccaacagccatttcacagaccacaatgaggtgatgttgtttggtgccagtgacagttattctgatgataagatcatgcaaatcaccttggcatt

SEQ ID NO: 89339 - DNA, 260 bp, Glycine max
  Clone ID: 700906074H1
ctcaaaatacagaggatgattggcttgagactgagaaaaaagttatcattatccaccgtcttcatcagattcttgagcctttcatgctcaggcgtcgtgttgaagatgttgagggttcactaccaccaaaggtctctatagttttacgatgtaagatgtcagctgtccagagtgccatttatgactgggtcaaatcaactggtacccttcgtcttgatcctgagggtgagaacagtaagattcaaaagaatcctcattac

SEQ ID NO: 89340 - DNA, 261 bp, Glycine max
  Clone ID: 700906075H1
atacgcaaccggtaacactgctcacgccaccgccggaaaatcgcaaccaccgtctgccaccatcagttgattaaaatttgatggataacaataattggagacctaatcaaggcactgaagccaatatggatactagtgattggagaggtggactgccgcacgagtcacgccaaagaattgtcaacaaaataatggacacgttaaaaagacatcttcctgtttctgttcaagagggattgcatgaacttcagaagattgctc

SEQ ID NO: 89341 - DNA, 130 bp, Glycine max
  Clone ID: 700906076H1
agcaaaaccaaaggagaagagcattgtatatagaataaggaaaataaaaaatggaagggtgagtagagatagagagagcaaacgcaaacgctggttgtttcgtttttgttttgttgctgttttcctttta

SEQ ID NO: 89342 - DNA, 266 bp, Glycine max
  Clone ID: 700906077H1
tccaccccgaccagaaatcaaacatgaaacccttgagactctctgtttctgaccttccaatgttgtcatgtcactacatccaaaagggcgtgttactcaccgccccgccctcctcttttgacgacttaatactttcttttaaacacactctttctatcgcgctctctcactttcccgctctcgcgggaaggtttgagaccgattccaacggttacgttaatattgtatgcaacgacgctggcgttgatattattcatgctaaagca

SEQ ID NO: 89343 - DNA, 260 bp, Glycine max
  Clone ID: 700906078H1
cacagagaaagagacttaaaaaaaaacgggatttgttttgctgggttgggttgtgtgaattgtgaaatgcgggtgacggagttgcaacgtgccacggcggtgtaagatcttccggcggcaacgagcatttcttcggcgagatgggttcggggcagattggcggcggcggaaacggtggtggttgttctaacggcgggagttgttgtgatatgagtgtgaagtgttcgtgtaggtggagattggagaaccaacaatactac

SEQ ID NO: 89344 - DNA, 265 bp, Glycine max
  Clone ID: 700906079H1
cacctagacaattggctcagaagaaaagaaaagcaaccaaaaatggttctcacatccactgccacacacccagatgaagaagaccagagcctaaactatacttttgcttccagatatgtgcgtgaacctattccaaagttcaagatgccggagaaatccataccaaaagatgctgcttatcagataataaacgatgagttgatgttggatggtgcaccaaggctcaacttggcctcgtttgtgcaaacttggatggagcctgagt

SEQ ID NO: 89345 - DNA, 269 bp, Glycine max
  Clone ID: 700906080H1
ggcaaactcaccacgtacaaccccagctgcaacatcaccatcttccggcacgccactggcggtaacactaccaccaacagtggtggcgtccccttccaccacaagtacaccgggaactacatcgcagccacctgcaattgtagctcccaaacccgcacctgtgacaccaccagctccaaaagttgcacaggcttcaagcccaaaagccccaccaccccaaactccacaaccacaaccaccaaaagtatcaccagttgtaactcccacat

SEQ ID NO: 89346 - DNA, 264 bp, Glycine max
  Clone ID: 700906081H1
gttggattctttttggtttctttctttcccatgtatatctttgtttttttcatttgattttagtttttcccccagacaccagccatggctcttcctctgaaaccttcttgagccaaaggctgtatcaagctcagaacaatcatcagtcagggtgacatattctgaaggtagtttgatctttgaagaaagtaccttattcttgagaattcttaagattatggaagcttcttcaggtgttgattatgctgacacaaacatgagcat

SEQ ID NO: 89347 - DNA, 101 bp, Glycine max
  Clone ID: 700906082H1
gcttcactttccctctctctctccacaccaacaacactagtatcactctccttcacatcatcctccatcttcttctcttcacaccaattccacacaacata

SEQ ID NO: 89348 - DNA, 259 bp, Glycine max
  Clone ID: 700906083H1
gcaatggaagcaatcacagagggagtgaacaacatcaacatctccgattcttacaagaagaatcgcattcaggtctccaacaccaaaaagcccctcttcttctacgtcaatctcgccaagaggtatatgcaacagcataatgaagttgagctctcagcactaggaatggctattgctacggtggttactgttgctgaaatcttgaaaaacaatgagcttgctgttgaaaagaaaatcacaacatcaacagttgacatca

SEQ ID NO: 89349 - DNA, 259 bp, Glycine max
  Clone ID: 700906084H1
acaacacatgggtgtgtagtagaattgcagtgaaattggaaaaatactcaaacatggagcgctatgatgacctcaaagatattggttcaggaaattttgctgtggccaagcttgttagagacaactacaccaatgagctttttgctgtcaagtttattgagagaggccagaagattgatgagcatgtccagagggaaatcatgaaccacagatcattgaagcaccccaacattattagattcgaagaggtcctgttgac

SEQ ID NO: 89350 - DNA, 254 bp, Glycine max
  Clone ID: 700906085H1
ctcagatcgcttattccagtgctccgcggcgcacgtgtggtgcggtgtgctgtcagatgaccatggaggagaagcctctctctgagaaccaaatgctcgtgtatgtgcctcctcatccgttgatcaagcactgggtttcagttttgaggaatgagcaaactccttgtcccatcttcagaaatgcaatggctgagttgggaaggctactaatgtatgaagcttcaagagattggttgccaactgtttctggagag

SEQ ID NO: 89351 - DNA, 250 bp, Glycine max
  Clone ID: 700906087H1
gcagatgatcaaatcaaggtcccagttcatcaagattgcaactttgagccttgttttctgtgcctctgtggttggtggcaacatttctctcaggtaccttgctgtgtcattcaaccaggctgttggggcaaccacaccctttttcactgctgtttttgcctatttggccaccctcaagagagaggcctgggttacctatggtgccctggttcctgttgttgctggagttgtcattgcaagtgggggcgag

SEQ ID NO: 89352 - DNA, 258 bp, Glycine max
  Clone ID: 700906089H1
cgctctttcagctttgactttggtggaaactaaagactagtcaaaatggtgaagttcacagctgaagagctgcgtcgcattatggactataagcataatatccgtaatatgtctgtcattgctcatgttgatcacggaaaatcaaccctgactgattctcttgtggctgctgctggtattattgctcaagaagttgcaggtgatgtccgtatgactgatacccgtgcagatgaagctgagcgtggtattacaatcaag

SEQ ID NO: 89353 - DNA, 258 bp, Glycine max
  Clone ID: 700906090H1
ctcttcttctcttgcggctagggttttagcgcagttcttctagatttaaggaagatgggtaaggaaaaggttcacatcagtattgtggtcattggccatgtcgactctgggaaatccactaccactggtcacctgatttacaagcttggaggcattgacaagcgtgttattgagaggtttgagaaggaagctgctgagatgaacaagaggtctttcaagtatgcctgggtgctggacaaacttaaggctgagcgtgaa

SEQ ID NO: 89354 - DNA, 258 bp, Glycine max
  Clone ID: 700906093H1
aagaaaaagaaaactagtaatatggcttcaagaactatatgttttaccattcaagtgactcttgtagtagcttttctaacaacaaaggttgttttatctgatgacactgtgccaattcccgcgaacaaagcacaattaggtgaatggtataatactaatgtggggcctttagatcaaagaaagagcaccgtggacccagcattggtgactgctgaagaaggcgctaaggttgtaaaggtgatgcaagatggcagtggg

SEQ ID NO: 89355 - DNA, 267 bp, Glycine max
  Clone ID: 700906094H1
gttcttaacctttcaatccattcggctgaggttaccttccccttggccataatcacccaaaaaataaaaataaagaaaagaaaagaaaaaagaaccttcatggcaaaaatgcataatttcttccttttaacgtgtttgatagtcatcatacctaccttgcatgccaatgtcaaggaggatgaaatatattggaagaggcaaagtcaaatacttaatgattcatattggaagcaaaaagcatcagttgcagaaaaagagaacaaacaa

SEQ ID NO: 89356 - DNA, 266 bp, Glycine max
  Clone ID: 700906095H1
gctggttttggataactcagtgtgcttcaaggtagggttcatggcggcgaattacgcgattctggaagccgcatttgaggagaaaacggagaataacaggttctgcgtggtggattttgagattggaaagggaaagtcagtatttgcacctcctcaacgcgctctcggcgcgtgaccagaacgcggtggtgaagatcgcggctgtggcggagaacggcggcgaggagagagtgcgcgccgtgggagacatgctgagtctactcgca

SEQ ID NO: 89357 - DNA, 251 bp, Glycine max
  Clone ID: 700906103H1
gtttggtcttgttaggttacctctgtgacatttgtgttgttagttcgtagttgcggctgacacccagaaagaaagaaagcaggaaaaaaacaaaaaggcgcagatgggtagcacaggtttctcatggaaattggcggatcatccaaagcttccaaagggtaagactgtggctgtggtggtgttggatggttggggagaggccacacccaatgagtacaactgcatccacaaggctgaaacaccctgcatgg

SEQ ID NO: 89358 - DNA, 248 bp, Glycine max
  Clone ID: 700906108H1
ctcgagccgcgtttttgacgtaccctctcttctccaagctgtggccgccgacactgttatcgccgctgcgcaatctatcgctttgattggatatctgctgactaatgacactaattcagtgtcaccaaatttgacagcagcgaatggaaggtttcctttagaagacctttttgggaggaaacatgcttatctagaaaacaagaatagtgaaacagaggacgacgacgaggatggagatgaggatgatg

SEQ ID NO: 89359 - DNA, 118 bp, Glycine max
  Clone ID: 700906109H1
gaggaacctctctttcttcttcttcttcttcttcaccttcttcgccgccgtcagatctgatccctcagatcaccgctacaaagaaggcgaccccgtccctctctacgccaacaaagtt

SEQ ID NO: 89360 - DNA, 248 bp, Glycine max
  Clone ID: 700906110H1
gctccgggtcctgttcctcctgctgatggcagtgatggtggagtggatttgcaattgcaatggaattatggtttggagccagagaggaagagactaaaagaacaggattttttggagaacaattctcagatatcttctgttgatttccttcaaccacgatcagtgtcgactgggttgggcttgtcactagacaatactcacctgacatccaccggagactcagctttgttgtcactcatcggtgatga

SEQ ID NO: 89361 - DNA, 247 bp, Glycine max
  Clone ID: 700906112H1
tttcgttattctcttattcatccttctcttctgaataatccatatctctttctgcccttttctccgtcacgcttttcgtgaccggatctgtatggatttgatccagatctacacgccgatggtggttttggccgtgtctttcatagatctggtgcgtagaggctcagatctacggtaccgaggtacaacagataatcgatgacaagaacgcagatccgacggtagatccagccgattccgcttgttc

SEQ ID NO: 89362 - DNA, 248 bp, Glycine max
  Clone ID: 700906113H1
tcgtgatccagggttgcaacatcgtcccagaagccgaacttttccctacaaggttccaagtgaagtcataccttgtagggccatggacgcaattctcaaggacggttgtgatggaatccaccgtgggtgacttccttcaccccgaaggatggtgcccatgggccggtgaacacttcgaagacaccttgtactatgctgaatacaacaacgatggacctggtgccaacgttaacggaaggatcaagtgg

SEQ ID NO: 89363 - DNA, 250 bp, Glycine max
  Clone ID: 700906114H1
ttctctttcaacgcattccaaccctgtggcgctataccctcctagatctactctctaaccgcttcacaggctgggactaagagcagtggttagtcatacatggcactcttggcttcgcgagcaatgtcgaagggtgtggtggtatcagtgcctgttcttgttctatctgctttagtggccactgttttcctgttcttccttttgtcctctctttcatcctgctcctgccctactccttcagaaatatctg

SEQ ID NO: 89364 - DNA, 251 bp, Glycine max
  Clone ID: 700906115H1
ctcacttgccttatttttggttttgagattgagctaaaggccaactcaaccatcgaatttgttggtgattgaaagagaaggaagaagaagcaggaaatggaagcagtgagagctggtcgagaaggagcaataggtctaggtcaaggtgatggcgtagcaaggacagcactgagactgaactcaccaaaatccgtctcctcagggcaattgttgaaacccgtgatccctcttccaaggtaaaccacactatt

SEQ ID NO: 89365 - DNA, 141 bp, Glycine max
  Clone ID: 700906116H1
ctgcccccctttttttaagttgtgttattttataaggggaaaagggcaagaggatgtaaatttttactttttctggttgagaacgttggatgcattaatgttaaaactttgtaattgttccatctggtccatggccagcgt

SEQ ID NO: 89366 - DNA, 75 bp, Glycine max
  Clone ID: 700906117H1
gctagccagaaaacagaacttggtgctgaggtgttgaatgattactgggtgtctgtcacttcaggaagtgaggat

SEQ ID NO: 89367 - DNA, 245 bp, Glycine max
  Clone ID: 700906121H1
ctcagataccaaaatggctatcaccgggtgcacaaaatatgataaggagaattcttgatcctaaccccgaaacacggataacaatggctgggattaaagaagacccatggttcaagaagggttatattccagcaaatcctgaggatgaggatgtacatgttgacaatgaagccttttcctcccatgaagaaccaaatgaagcagaacagaggaattcaggatcaccaaccctaatccgtgcattt

SEQ ID NO: 89368 - DNA, 243 bp, Glycine max
  Clone ID: 700906122H1
aaacttgatatcttgaattaccagaccatgcatgcattaggtctgcttcaactaaaagaccctctaaaattaatttcatttccaaaatccgcaatccaaggtgcaaagcctgtaatctctcagaacttgtggccacgcaaagcttcaaagaactcatcagatccattggtaaagcttgttcatgaactgcagagagatttggaattagtatatgttgggcaagtttgcctctcttgggaaatc

SEQ ID NO: 89369 - DNA, 243 bp, Glycine max
  Clone ID: 700906123H1
acagcgcaacaagcagtgtttcatcaccatagtcttatttaaaaaagactacaactttccccttccttaatccttacgcacaatgattggctatttgacttgttcacttcatggttttcgctaagtttgtcttctacttccgtgttagtgtcacaaaaatttgaaaaaataggttatgtatggaacgtgaaacaattttacaataaaatctcattataaactgccattatattagtttaacca

SEQ ID NO: 89370 - DNA, 246 bp, Glycine max
  Clone ID: 700906125H1
gtctcacacacccttctactctcgaaacccccaagatctcttttggtgctaaggatgttgatgtgacggaatggaaaggggccattctggcagtgggtgttacggaaaaagatttggctagagatgctaactcgaagtttgagaatgtgattttgagcaagattgactcaaagttgggtggtttattagctgaagcctcttctgaagaggatttctctggcaaagttggtcagtcaactgttctta

SEQ ID NO: 89371 - DNA, 244 bp, Glycine max
  Clone ID: 700906126H1
ggtttgtgcagcatcttcaatgtgtacctgcatgtgtctcttcaatcctgaagattctctctaacaaactattattttctgaaaatcaagtatgcggctgaagttcatcgatttatggtttccatcacatactctcaactgtggttgacagagacaccactgggaatgccaaaaaaatgtgccttcttggttgcagctttgtggttgagattcataaggtgatacctttgctattgattcccca

SEQ ID NO: 89372 - DNA, 245 bp, Glycine max
  Clone ID: 700906127H1
agctagcaaagaagacccttggatagatacaaagatgttttttttaagggccaatttgtttacttcagttacatactatcaaagttagagaacgaaggaacttttgtactttctctggcgtgtgtgtgtgtgcctgtctcacaccacaaacactgaaagtacaatcttcttgtggttacaaaaactctgaaaaacacacacacacacacacttcttatgcctatggctggtgagcaaggtgatag

SEQ ID NO: 89373 - DNA, 244 bp, Glycine max
  Clone ID: 700906128H1
gagaatccaacggagacaattgtcaataatttgacggaatatttgaagaagaagggtttgtcaaaaggtttagttattgggagctgcagcattcttgagactgctggtcaaggagcactcattcccctctacaagacattgcagtctgccattacttccaaggaatcggaatcttcaagctccaataaaattatatggctgcattttggggttaacagtggtgcaacaaggtttgctatagagc

SEQ ID NO: 89374 - DNA, 120 bp, Glycine max
  Clone ID: 700906133H1
cttgattgttgcatgatgtcttgtataagcaaagtcatgtcaagatgggaagacccccctttttcaaccgctttctttgccatctcacagagtttggttgccctttctcttctctctttg

SEQ ID NO: 89375 - DNA, 250 bp, Glycine max
  Clone ID: 700906134H1
catttttccttccctccaaaatggaagagaaactacagtacccctgtctctcttccttgttaaccctcttcctctgcatctccgccacttccactaacccacacaacccccaaacccaaacccttctcctccataccctccctgacccacccacactctcatggcccgaatccgccaccgtagaacccgacccggaacccaccacatccctctcccttcaccacatagacgcactctccttcaacaaaac

SEQ ID NO: 89376 - DNA, 244 bp, Glycine max
  Clone ID: 700906136H1
gaagggtcaaaagaacccccatcggggagtgaaatagaacatgaaaccgtaagctcccaagcagtgggaggaggctcgggactctgaccgcgtgcctgttgaagaatgagccggcgactcataggcagtggcttggttaagggaaaccaccggagccgtagcgaaagcgagtcttcacagggcaattgtcactgcttatggacccgaacctgggtgatctatccatgaccaggatgaagcttgg

SEQ ID NO: 89377 - DNA, 242 bp, Glycine max
  Clone ID: 700906137H1
gaggccgctcgtcaccctgatgccaccactgtagttacaggcatagttggttgtgcaggattaaagccaacagttgcagcaattgaagcagggaaagacatagcattggccaacaaagagacaatgattgcgggagccccttttgttcttcctcttgctcacaaacataacataaaaattcttcccgctgattcggaacattctgcaatttttcagtctatccaggggttgccactgggtgc

SEQ ID NO: 89378 - DNA, 209 bp, Glycine max
  Clone ID: 700906138H1
cacattttcactcctcacgcacaactcaccacgcacaatactccattccttatggtctctattgctccattctgattttttgtttgttggcactcaaagggccacaccctcatcttgtggttctccttcctccactcccttcagtctctatcactgtgatacatatatgattcaccttcactcactataattcttcgttcctgttcccc

SEQ ID NO: 89379 - DNA, 244 bp, Glycine max
  Clone ID: 700906139H1
accaaagctctctcatatctcatacagactacagtaatattttatttgcactactactactactttatttaagcagaagcaggcgagtgaggaagagcgaagagtgaagagaatggctcccaagggtttaacctttctggctgtgttaatatgcgtttcagcactgtcactgagtccttctgttgcgggggaagggcaaaataatggccttgttatgaacttctacaaggaatcatgccctcag

SEQ ID NO: 89380 - DNA, 243 bp, Glycine max
  Clone ID: 700906140H1
tatcaatcaaatgaatggtgccaattctgtttcagaagatgaaaatgaggatcttcttgctgactttattgatgaagatagtcaattaccaagtcgaagttctaaaccccatcattcaagagctctctcttcacatgttaatgacgaagagaatacaacacaaactggatcttctctctgtctattaaagtctatggataaatatgcaaggcttatgcagaaattggaagtggtaaatgttga

SEQ ID NO: 89381 - DNA, 241 bp, Glycine max
  Clone ID: 700906142H1
ctctctctccaaagcaaacagaaacagctacaatcacatgactcgtgccttgagatatttaggcgagcgaaactcgtccaccgactccgctgtcgtcgattccgacttcgtcgtcatcctcgccgccctcctctgcgctctcatctgcgttctcggcctcgtcgccgtcgcccgctgcggctgtctccgccgcctccgcctctcctcctctgcaaccactccccagtctcctacctccgcc

SEQ ID NO: 89382 - DNA, 242 bp, Glycine max
  Clone ID: 700906143H1
gggaaatcgacgcttcactcaggtcgcaaccagcgaagatgaggacgaagcaccgccgcctcctcctcctcccaagcagcaatcgtcggtcagtgcccccgaagagaaccgttcgaagcagcagcagcgcaagaggaagagaatgaagcttcaagaagaagaggaagaggaagaggagaaagaggaagagaagaagaagaagaagagaaagatcaaagacaagcaagaagagagatcgaacg

SEQ ID NO: 89383 - DNA, 242 bp, Glycine max
  Clone ID: 700906144H1
gccttccgaaggtggcagcccctccgacctcctcttcctcgctggcggtggttcttcccattaacattctaaagtagtattagccattaacattacatcctacaccttcaaaagttctctctattagcggtttctggtttcttttgttcttcttctttggtagttgttaggtttggtgaggtctaagatgttgagcattaagagggttcccactgtggtttcaaattatcaaaaagaagaga

SEQ ID NO: 89384 - DNA, 245 bp, Glycine max
  Clone ID: 700906146H1
cttctcttgcggctagggttttagcgcacatcttctagatttacggaagatgggtaaggaaaaggttcacatcagtattgtggtcattggccatgtcgactctgggaaatccactaccactggtcacctgatttacaagcttggaggcattgacaagcgtgttattgagaggtttgagaaggaagctgctgagatgaacaagaggtctttcaagtatgcctgggtgctggacaaacttaaggctg

SEQ ID NO: 89385 - DNA, 246 bp, Glycine max
  Clone ID: 700906147H1
tatcaatcaaatgaatggtgccaattctgtttcagaagatgaaaatgaggatcttcttgctgactttattgatgaagattgtcaactaccaagtcgaagttctaaaccccatcattcaagtagactctcttcacatgttaatgacgaagagaatacaacacaaactggatcttctctctgtctattaaagtctatggataaatatgcaaggcttatgcagaaattggaagtggtaaatgttgagtt

SEQ ID NO: 89386 - DNA, 72 bp, Glycine max
  Clone ID: 700906149H1
tcgctctcgcggtctgtgtcccggtctgagcatggaggaagacaacagtcaatcaaaaaccgagaaccccac

SEQ ID NO: 89387 - DNA, 245 bp, Glycine max
  Clone ID: 700906150H1
tctttccccaatttgtgagtgttactgttgaatcgattggattggcattaggttgatctgaaatacgcaattgacatggcgagcgcgatggtagaggacgcgaacttcgaagatgaccaactagccaatatgaccaccgacgacatcgtcagagcttctcgtcttctcgacaacgagattcgcatcctcaaggaagagttgcagaggaccaatttggaattggaatcgtacaaggacaagatcaa

SEQ ID NO: 89388 - DNA, 243 bp, Glycine max
  Clone ID: 700906151H1
gcactctcttgttttctctctcaccctcatatccatcatcttccacacccatggagcgtcctctgagcaatcaataatcaagttacccacagaccaaccaagggtagagaaactgacccacttgcattttttctaccacgacatcttagagggcaagaacatcacggtggtgaaaatcatcgagccatcagcgagcgaggttcgtgaagcaactgggtttggaaccactttcatgatggacaa

SEQ ID NO: 89389 - DNA, 81 bp, Glycine max
  Clone ID: 700906152H1
gcagcctctgctctgttcctcctcgacatcaaaggccgcgtcctcatctggcgcgactaccgcggcgacgtctccgccctc

SEQ ID NO: 89390 - DNA, 236 bp, Glycine max
  Clone ID: 700906153H1
gtttgttccagcgttggaaacgtgcgctcggattaaaataaccgacccgaacccgaaatgggatatggaaacaatgcccggtgctagagtcatgagtgacatggttttactcccgaacggcgacgttttgattgttaatggagcagccgtagggactgcgggctgggaattgggccgtaacccgctactgagtccgtttctttataaaccaaataatcgggtcgggtcgagatttg

SEQ ID NO: 89391 - DNA, 239 bp, Glycine max
  Clone ID: 700906154H1
tccagatccaagccctcggtgacaccgatccccgcgtcggtgaaacttgccgatacttggcggaggcaaatgtgcaagcaatgcagtttgataaagcagaggagctgtgtaagaagacacaggagattcatcgggcacatagtgaaccggcttcgcttgaggaagctgcagataggaggctcatggcgctgatttgcgaggcgaagggagattacgaatcagcgttggagcatcttgtg

SEQ ID NO: 89392 - DNA, 242 bp, Glycine max
  Clone ID: 700906155H1
ttctttctctcttctctctctgtccgaagatggcttcacgcaggttcgtatcttctctgattcgatcctcccttcgtagatctcaatcgaaaccctcgatttccgcatccgcatcgaggttcacgtcatccaaccgtgcctctccgcacggttacttgctgaaccgcgtcgccgaatacgctaccgcggcggcggctgctaccgctcctccctctgctccgcctccgggcaagaaggaggtt

SEQ ID NO: 89393 - DNA, 244 bp, Glycine max
  Clone ID: 700906156H1
atcagactagagagagtaagagtaagagaagagatggaaagagtagcatcagtatctcggccactgaaaatatacttcctcccattcttctcaccggggcacctaatccctctggtccagctggctcgcttggtggcggcacgaggccagcacgtgaccatcatcaccacccccgccaacgctcaactcttcgaccagaacatcgacaaggacaccgcctccggccaccacatccgcgtccaca

SEQ ID NO: 89394 - DNA, 241 bp, Glycine max
  Clone ID: 700906157H1
gaaacagacacgtggtgggttggaataaaatttgccatgtttacgacaagttctgtaggcatgttggtgcctccatagcagtggctttgtttggaagcgttgtgacagtcttgctcatttggctttcagcttacagcattcatagccgagtccccaagtagatggaaggaacatggatcatgcattctgcatatttatgcatacatcttcatttattgtttataaagttagtgtgctcagt

SEQ ID NO: 89395 - DNA, 242 bp, Glycine max
  Clone ID: 700906158H1
cttgattctgttgttatttgcatttgaagctgtttgcttggggacgaaagtatttttttgctcagagacaaatgaaaaaaaaaatgtaaaacaagattgttacatgcatgtggatgtacaaaatgctgctacatattgcttgaaattttacaataaggaaacaaaaaaaatttgaaatgcaatatgtaaaaatcaagtcttttataccgtgagtgattattgacgaataaagcctgctaaat

SEQ ID NO: 89396 - DNA, 240 bp, Glycine max
  Clone ID: 700906159H1
ggctttgcgagctgcacatggaaaatggggaaagctgggagctgaagaggaagaagaagaagaagaagaagaaaaggaggagggtggtgagtttggtggtgttctgaggatgtgggagggtgaagttcttgattgtttcgatgatcatcgcatagctattgaatccacgtgttgtccttgctaccgatttgggaaaaacatgaagagagctggttttggttcttgctacattcaggcagc

SEQ ID NO: 89397 - DNA, 243 bp, Glycine max
  Clone ID: 700906161H1
ttccactccccccaatagccgctattctactcgcaagcaaatcagaacaagagaagagaatggcaggagcagaggggctaaacagagaacagtacgtgtaccttgcgaactgtcggagcaggcggagcggtacgaagagatggtggagttcatgcagaaggtggtggtggggtggacgccggcgtcggagctcacggtggaggagcgcaacctcctctcggtggcctacaagaacgtgatcgg

SEQ ID NO: 89398 - DNA, 246 bp, Glycine max
  Clone ID: 700906162H1
ctcgttttttctcagaaccttctgaggttaaagcaaaaaacaaagagagagagagagagaaaatgatgaagccatcgatgctcagatctctccactccgccgccacccgcggcgcctctcatctcttccgccgtgggtacgcctccgagccggtgccggagcgcaaggtagccgttctcggcgccgccggctgggatcgggcagcctctctcccttctcatgaagctcaatcccctcgtttcgagc

SEQ ID NO: 89399 - DNA, 245 bp, Glycine max
  Clone ID: 700906163H1
tcgaaaccgattagattagaggcttcaaacaagaggccccaaaacccaaaccctattctggttcacttgcgattatggcgtctgagagcgcttctcgatcgagttccgcggccgattcgtacattgggagcttgataagcttgacctctaagagtgagatcagatacgaaggcatactctacaacatcaacaccgaagagtccagtattggcctcagaaacgtgcgatcttttggaacagaagga

SEQ ID NO: 89400 - DNA, 247 bp, Glycine max
  Clone ID: 700906164H1
aaactgacatagttcagacttcagacttcccattccaatttccaagtttttcaaagaaggtgagtgatgagcatggagcatttgccaggagaattggtgtccaacgtgctctcaaggttaccatcgaaggtgttgcttctatgcaagtgcgtgtgcaagtcctggttcgatctcataaccgatcctcattttgtttccaattactatgttgtctacaacagtcttcaaagccaagaggagcatctct

SEQ ID NO: 89401 - DNA, 247 bp, Glycine max
  Clone ID: 700906165H1
gtgctaaatccctagtaagccgccatggtgaagtactcaagggagcctgacaatccaaccaagtcttgcaaggctagaggcgccgaccttcgggttcattttaagaacactagggacactgcctttgcaatcaggaagttgcccttggttaaagctaaaaggtacttggaagatgttcttgcgcacaagcaggccattccgttcagacgtttctgtcgtggtgttggaaggacagctcaagcaaaga

SEQ ID NO: 89402 - DNA, 244 bp, Glycine max
  Clone ID: 700906166H1
cggtgaagaactacgaaagcaccgaccagaacttcaacaacaacaacagcataatcggaaacgcgagtgagggagcgtcggatatggctttgggtgattcgatccagccggacatcgatgaggatctccacagtcggcaactcgtcgtgtatgggcgagagaccatgcggaggctctttggttccaacgttcttgtctcctggatgcagggtcttggcgttgagattgctaagaatctcattct

SEQ ID NO: 89403 - DNA, 240 bp, Glycine max
  Clone ID: 700906167H1
caaggagcgaaacatcattcataaggtcacatcttcattaactggatcaattattgttgaagatgtaatttatgaaaatgttgatagtgaagtcagttgtatttttccttctggagagttgatgtttcgacgccttgtattcgagagagctgcaaatttggtgcagtctgaagctttgctaaaagatgaacagttgcctaccaaattggttagtgagacagggaagaagaaaaacaatgc

SEQ ID NO: 89404 - DNA, 81 bp, Glycine max
  Clone ID: 700906168H1
cacggagatgatagcgaaagacgaaatttacgatagcttttgaaggtaccagtttttgtcatcactctctcagctgatcgg

SEQ ID NO: 89405 - DNA, 231 bp, Glycine max
  Clone ID: 700906170H1
caaaccttttgcaaaatgtccatagcagaggaggagagtccaagtgtgatgccaaaagtgatcactttcctctgctctcttcttgagagggtggctgagtcaaatgatcacaaccaacacctccaacagcaccagaagatctcagtgttccatggcctgacaaggcaaacatctcaattcagtgctatcttgagagaatcttcaagtacgcgaattgcagcccttcatgct

SEQ ID NO: 89406 - DNA, 237 bp, Glycine max
  Clone ID: 700906175H1
cgcattctcattgggttcagtgagagttctttcttttgtttgcaactcattaaagttaatgcctttcaagtccattcacactgttgtcagttttcatagagagatctagacactttaaccatttggggtgtgaagaacaatcaaactaacttgtggggtgtgtgtgaggttcatcaatcttcatcaagagtcactgaattggtgaccctttgatcaaagggccaaaagggtacccgg

SEQ ID NO: 89407 - DNA, 232 bp, Glycine max
  unsure (1)..(232): unsure at all n locations
  Clone ID: 700906178H1
cttgcagtaatggcttcaatgaataaccaaaaagaaattgagctctttgagggccaatctcttctgtacatgcagctatatgggcacctaagacctatgtgtcttaagtgggctgttcaactaggtattccagacatcatacaaatttatgccaaacccatttctctttctgacttggtctctactcttcaaattccaccagctaacgctgtcacngtgcagcggttcatgc

SEQ ID NO: 89408 - DNA, 238 bp, Glycine max
  Clone ID: 700906179H1
acagattactgagattgttttgtttttcatttttggttgttttttttggcggaaataactcgtaataagcatgacaagcaccatgcaactaactatggtcaagggcacgatccctgatgctttgagtagaagagtgtgttgtcagtgtcaagcatccctgtggccgccatggcgaattgggttttttgctcccgttccccttgtgaggagagtttcgagtgagagggtggcgacactc

SEQ ID NO: 89409 - DNA, 245 bp, Glycine max
  Clone ID: 700906180H1
agattgggcatccatttctgttcttccagcttctccaatcgcttgtatgagaagaatgaatttgttgaatagtaacatgagatttaggaaagccgtgaataatctttgtagcatgctcagtgaacgatatgcaaagcaactggaaaagtcccagtactcgtcattaaacaatgatcgcaaacagtttgtgcgatcccagtcctgtgaaggaatctcaagaaaatgaagaaattacatcagctatt

SEQ ID NO: 89410 - DNA, 241 bp, Glycine max
  Clone ID: 700906181H1
ctccaatcctgatgatattgtgattgttgttggtgcaacaaataagccacaagaattagatgatgcagttcttaggagactggtaaagagaatatacgtacctttaccagatgaaaatgttcggaagcttctgctgaaacacaaactcaagggtcaagcattctccttactaagtagagatcttgagaggcttgtaaaggagattgaacgatattctggcagtgatctgcaagcctggtgt

SEQ ID NO: 89411 - DNA, 240 bp, Glycine max
  Clone ID: 700906182H1
ataacactcgatccagcacataacaatggaaacgcagctttacgtgttttctctctagattctgctcttaaacgccgtcgttttcaaactctttttttccccttcgtttctctgtctttgtaaccgaaaggggggaaaatataattaacaccgattttgcgaccaattcttcttctgcgttgaattgggacaacgagaaattggatctcagtttttggcaggaaataaaaattgcatttg

SEQ ID NO: 89412 - DNA, 239 bp, Glycine max
  Clone ID: 700906183H1
tattgaagctgtcttgttgatgattgaaaaccctgccagggccaatggccacatatttaatgtgggcaaccctaacaatgaggtcactgttaggcagcttgctgaaataatgattcaggtttactcaaaggtaagtggagaacaaactgctgaaacacctaccattgatgtgagctcaaaagaattttatggtgagggatatgatgacagtgacaagagaatccctgacatgaccataa

SEQ ID NO: 89413 - DNA, 235 bp, Glycine max
  Clone ID: 700906184H1
tatacgcatctctccctctctctccttaccacccaaaatgcgtcttcctcgccagctcaatttacgtgattcagattcgcttcttcctctcccttttctacaattctcagatttgtaagtgggtcggtttttctgcttaaaaagtctctttcggtctgaaatttctttgttttttggcgtgtcagtgccctatgagatagaatctgcgcgagaaagcgacagcaatcattgcagt

SEQ ID NO: 89414 - DNA, 236 bp, Glycine max
  Clone ID: 700906190H1
aaaggatcagggagaaaagggccccaacgagtctaaagattccgagtacgcggcgccccaagttcatacctaatccgtcatcccccacttcaaattccacttataccctcatcgtttcctttccctttaaacccatcatcattccctttcaacatcacattattcccaacgagttgacaccgattccactcacccaaccatagaacgattcaggcgatttgagctcatcgaacagc

SEQ ID NO: 89415 - DNA, 235 bp, Glycine max
  unsure (1)..(235): unsure at all n locations
  Clone ID: 700906191H1
tctctctctctctctctctctctgttttctctctctcgtctcacttgaaactccacaacccaattttcttttcctatgacccaattccaaatccaaatcaccaattctaattccattcttcaggagttgaattgaattcgtgatgaagagggaccacaaagatagctgcggcggcggcggcgcgcggnagggactgtgaagggtgagtgttcctcaatgcagtcaaacgggaagg

SEQ ID NO: 89416 - DNA, 237 bp, Glycine max
  Clone ID: 700906192H1
ttcatctgcatgcacacagttgcatagttttggaaaccaagaattcctgaagaagggtagcatcaacaagcagttctgaaaatggagatcaccaatgtcagtgagtatgaggctattgcaaagcagaagttgccaaagatggcgtttgactactacgcatctggtgcagaggaccagtggactctgcaagagaacagaaatgccttttccagaattttgtttcggccacgtattctt

SEQ ID NO: 89417 - DNA, 236 bp, Glycine max
  Clone ID: 700906193H1
gttgatgataaataccagtactcctgtgagaacaaggtcaacactgttcatggatggatcagtgttgatgctgctgatgcaccacccgtgggtttctggatgataacgcccagcagcgagtttcgtaatgctgggcccatcaagcaggaccttacttcccatgatggccccatcaccctctcgatgtttgtgagtactcactatgctggcaaggaggtaaccatggcatttcaaga

SEQ ID NO: 89418 - DNA, 242 bp, Glycine max
  Clone ID: 700906195H1
caggttcagcagtgaccagaaagttttctttgacgcctttgaggcttcaatgattaagatgggtaacattggtgtgctcactgggaagaaaggagaaatcagaaaacattgtaactttgttaacaagaaatctgttgacgttgatattgctagtgtggcctcagaagaatcatcaacagagggtatggttacctcaatctaaatggattaggatgaatagttttcacttaaaatggtgtgat

SEQ ID NO: 89419 - DNA, 272 bp, Glycine max
  Clone ID: 700906201H1
ctcgcttcttccgatccagttcgactagcttttggaaacaattataatgacaacttcagagcagcaagtccctcccaaaactcctgcagctgatattgttggcaatgcttttgttgatcaatactaccatatgttgcatgaaagccctgagctggtgcataggttttaccaagatgtcagcaaacttggccgtcctgagcagaatggcataatgggtattacaaccacaatgcttgatattaacaagaaaatactatcattgggttatgggg

SEQ ID NO: 89420 - DNA, 273 bp, Glycine max
  Clone ID: 700906202H1
atccaatttccctatctctctctgtctctatatctgtatggctgaattttgggaatagaaaaaccctaagcaaagcaaagcggtaaggatggggaacacggagaagctgatgaaccagatcatggaattgaaattcacttcgaaatcgctgcagcgtcaatcgcgtaagtgcgagaaggaggagaaatcggagaagctgaaggtgaagaaggcgatcgagaaaggcaacatggacggcgctcgaatctacgcggagaacgcgatccgtaagcg

SEQ ID NO: 89421 - DNA, 265 bp, Glycine max
  Clone ID: 700906203H1
agccttcagatgctattgtctctaatcagttcaatggcctcatgaagtggatgataattttccatattttattcctacgtctgtaatagaaggagaccttatcgccgtggtagaaatcactctccgcaaagaattgataccatggttgtacaacatatctgtgcccaattccaatgtgaaggaccacaacattccactgcaatggaagtccaaatcttctacgtgcatacacagggtcgtttccttagtcagttagcaagtgtga

SEQ ID NO: 89422 - DNA, 216 bp, Glycine max
  Clone ID: 700906207H1
aaagaaagctctctcagagtagagtttgagatcatgaatcagcaaatggatgagctaaaagaaaagttagagaaggtggaagctgataaagctgaactagagatagctttgatgaaaagtgaagggtgtatggaggagtcacagcttcagttgagggaggcacaagagaaattggaggagttgcaaagagaggtagaaaatgcctacaaatcaaag

SEQ ID NO: 89423 - DNA, 269 bp, Glycine max
  Clone ID: 700906209H1
cgatcttatgagaactagtataatatcatcatcaagatttgtgcttagaaaagaagaagaatgcaaagtaataaaacatgttaacagtataggccaactgcgggaggcaggtcttaaattcaaggaatatagtggcatttgaggaatgtcacctttcagatgatacaaacatcattactcaataccgtaagattctagatttgcttatcaacactgaaaaagatgtgaatgtactagttgataaggaaattattgtcaattggatgggt

SEQ ID NO: 89424 - DNA, 183 bp, Glycine max
  Clone ID: 700906210H1
atttccttttcgtacaattcgtgtttgaggaattttgtattttttttttcctgttggtaatctaaaacttttcgcatggtaacagccaaatgaagcagaacagaggaattcaggatcaccaaccctaatcaatgcatttcaattgatagggatgtcttcatgcttagacctctctggcttttt

SEQ ID NO: 89425 - DNA, 173 bp, Glycine max
  Clone ID: 700906211H1
gtcaaacgcagaatcggcggcagaaattgccaccggaagcacgtcgaagacggctgaaccagacacagaattccatccaccacttctcttttcaatccccaactcaaatctgtgaagaaaatctcagatttctagattgtaattcttagcactactgctagtagtagtaaaaa

SEQ ID NO: 89426 - DNA, 264 bp, Glycine max
  Clone ID: 700906212H1
attcaattcctctcatggtcatgcaagctattttgggttcttggaataagacagcaggaggtggaaaacacatgggttcggagttagcacatcgaattggcatcaatgaagttgctgagagcattatggctttcaacaccaattacaaggacacgggtctttttggtgtttatgctgttgccaagcctgatagcttggatgatttgtcttatgctataatgtatgagacaaccaagttggcttatcgcgtttcagaagatgatg

SEQ ID NO: 89427 - DNA, 210 bp, Glycine max
  Clone ID: 700906213H1
acaaaatgatgaaggtgaggatgatgaaggaacataagacaaagaaaaaggataagaaggagaaagagaaggatcacaaaaaggaaaagaaggataaagaggagggtgagaaagaggatagcaaggttgaagtttctgttagggatattgatatagaagaaatagaaaaagaaggtgaaaaagaagataaaggaaaggatggtgggaagg

SEQ ID NO: 89428 - DNA, 270 bp, Glycine max
  Clone ID: 700906214H1
attcgatctcctcatctccaagaatggtgccaaacagaattcatgttacctgtgcattagtacatgagaaaatgcacaccggaaggattcacaaaggagtgtgtacaacatggatgaagaattctgtaccattggagaaaagccaggactgcagttgggctactatttttgttaggacctccaactttagactcccttctgataataaagtgcctataatcatgattggtcctggcactggattggctcctttcagaggtttcttgcagg

SEQ ID NO: 89429 - DNA, 63 bp, Glycine max
  Clone ID: 700906215H1
agacagcatatcttaatatcttccatgctccatccagttgggcacgacgagtctaaacgagaa

SEQ ID NO: 89430 - DNA, 269 bp, Glycine max
  Clone ID: 700906216H1
cccaaaacccgaacctccgcttcggatcctaatccagtaatccctgatgggaacggaacgctacacttacatggggcgcagtttgagcgaactccgcatcaacgacgattcctcttcctccgccttcagcgactgcaacagtgacagatctggcgaattcgccaccgcttcttcgcaaacgcggcggtttctcatcgcctgcgccaccgaaaattccgacgacttgatccgccaactcgtcgccgatctccactcctcctccatcgacg

SEQ ID NO: 89431 - DNA, 206 bp, Glycine max
  Clone ID: 700906219H1
ctcttcctcaccgattgctagaatggaatttcgatgctcagtcatctcttttaccattctcttctctcttgctcttgcaggagagagccatgtccatgcatcgctacctgaggaagattattgggaagctgtttggccaaacactcccattcccactgcactgcgagagcttctaaagcctctccctgcaggtgttgaaatcgatg

SEQ ID NO: 89432 - DNA, 267 bp, Glycine max
  Clone ID: 700906220H1
gaaatcggaagaaggattagggtttgtggagatgcaagggcaaggcgttgatgaagtgagcatagaagagttggcgtcgaatctttccctctacaaagatcaactgaaccaggttagagaactcttaaacgatgaccctgcaaattctgaatatgttgacatggagagggaactttccgaggtaagctcaattcaaccccagttttgatgttttgtttccgccttgttctctatcattcattcatcatcgagtaagcagatagatcc

SEQ ID NO: 89433 - DNA, 267 bp, Glycine max
  Clone ID: 700906221H1
acaatggcttctgtgcctcaaccaaaaatctcccttctaaccttattcttcttctcgtccttcaccatcattgcgcatgcaattgttcctcaaaacgaaaccttcaaatttgagaactcaggtgaacttggaccctacatcgttgagtacggtgcagattacagaatgataagcatcttcaactctccattccaagttggtttctacaacaccaccccaaatgccttcactctagctttgcgtgtagggctccaacgctcggagcag

SEQ ID NO: 89434 - DNA, 267 bp, Glycine max
  Clone ID: 700906222H1
caaaacggcgccatgcctaccgtcagtgtggggcgggatcgctgtttgcggctctaggaaagacttacacgcaagaggaattccaagacttgtgcttcagtttcgggatcgagcttgacgacgtcacgacggagaaggcaattgtgagaaaagagaagcatttggaggaagaagaagctgatgaggacgaagaagttatctacaaaatcgaagttcctgccaacagatatgacctcctgtgccttgataggcttgctcaagccctcc

SEQ ID NO: 89435 - DNA, 265 bp, Glycine max
  Clone ID: 700906223H1
atttggaaacagctagcaactatggctctcatgcagcttactagctctcctgttgccttattgctccgtttcatagtaatatttgctctatgttacagaacaatggctttggtgaagttgccaccaaacgcttcatcagttccggcggttttagcgtttggagattcgatcgtggactcaggcaacaacaacaacataaaaacactgattaagtgcaacttcccaccttatggaaaagattttcagggaggatacccaactggtc

SEQ ID NO: 89436 - DNA, 191 bp, Glycine max
  Clone ID: 700906226H1
gaaaaatccccacaattggtgcgagtccttgaagctctgaaagaagccacccacgacatccaacgacaccactcctcggattccccagccataaaggcactcctggaactccactccattctctcctcctcggacccctacctctccgctctctccgaccacctcatccgcctcaaaaccctcgtccactc

SEQ ID NO: 89437 - DNA, 146 bp, Glycine max
  Clone ID: 700906228H1
ctgaggcactgaaagtgtgatatggcaagagtcatttcctcttactgcgcacgcctcgcaatgcgcctcttctccaccagcaccacagccaacgcgttcgccgtcactttacccaaaccctcatcactctccctctcatcgggtcg

SEQ ID NO: 89438 - DNA, 261 bp, Glycine max
  Clone ID: 700906229H1
tggattttcaacttcaaagtttgctatcccaaagctactggattggtatttgctgaactttgcaaaagacttggagtcattgctggattggatccgtctccagttaccaagtgaattggggaaagaagcccttaaattccttgaggaaagaaaaaccgagcccttatcacaatttgtacaaattatgccatatgagttcagctttagatacttgatatgcacatagattgcctcccttttggccattgcaattttgtatac

SEQ ID NO: 89439 - DNA, 258 bp, Glycine max
  Clone ID: 700906230H1
ctgccttccgacactctaagaaaatgccgcacccttctttccacaagcttcttcaactatccactgtccaacccaaccaacaactgaggcttccggataattttatgaggaaatatgggggtgaactctctccaattgttaccctctctgttcctgatggtagtgtctggcatgtaggattgaaaaaagcagacaacaagtattgtttccttgatggttggaaagagtttgttcaacgctattccattggtgttggat

SEQ ID NO: 89440 - DNA, 217 bp, Glycine max
  Clone ID: 700906231H1
gaagcatatgcctcaaatgatctatacaatacattgtatgataggacagtaaaagttcctgaagatgtcattctcccatccacatctaaatgcgccttcccatcaacaatgtattgtctgaagcatatgcctcaaatgatctatacaattactgcccttcatgggctctttcttggccatatcgcaggcaaaatttgttacgggaaattattggtta

SEQ ID NO: 89441 - DNA, 73 bp, Glycine max
  Clone ID: 700906232H1
tttctcaatcagttagttcctcttttgctgtggctgattcagttggccatgcggcaggagagcgcatgcaaag

SEQ ID NO: 89442 - DNA, 268 bp, Glycine max
  Clone ID: 700906234H1
aacaaaagcaaagaaccctagacagtcacagaaccattccatagaaatgtcaggtgttggccctctttctcaagattgggaacccgtcgtcctccgcaagaaggctcccactgccgccgccaagaaggatgagaaagccgtcaacgccgcccgccgctccggcgccgaaatcgaaaccctaaaaaaatataatgctgggacaaataaagcagcatctagcagcacttcattgaacactaagaggctggatgatgatactgagagtcta

SEQ ID NO: 89443 - DNA, 263 bp, Glycine max
  Clone ID: 700906236H1
cagcattggtgactgctgaagaaggcgctaaggttgtaaaggtgatgcaagatggcagtggggaattcaagaccatcactgatgccattaaaagtatacctagtgggaacactaagcgtgtaattatttacattggagctggaaattataatgagaaaatcaaaattgagaagacaaagccttttgtcaccttgtatgggggtacagagaaaatgccaaacttgacttttgggggcactgcacaacaatatggcactgttgat

SEQ ID NO: 89444 - DNA, 255 bp, Glycine max
  Clone ID: 700906237H1
gcagaaagcaagctcatcctagagttttaaaaatggcagcagcctcctccatggctctctcttccccatccttggctggcaaggccgtgaagctgggcccatcagcccccgaagtcgggagggtcagcatgaggaagaccgtcaccaagcaggcctcctccggaagcccatggtacggcccagaccgcgtcaagtacttgggcccattctctggcgagcccccgtcctacctcactggcgagttcccagtgacta

SEQ ID NO: 89445 - DNA, 266 bp, Glycine max
  Clone ID: 700906238H1
ataaaatctcgtcttctcctctgtattgagacatggccgaagaagaggaagaatcagagctcagcgataagcagaaagtggagatcgcgaaatggttcctcctcaactctcctctcggagaaatccaatacgttgccaaagatgtgaaatcgattctcaacaacgacgatttgtacaaggaagccgcttccgaggcttttccctattacaacaaatcgcacttgatttccattccaatgtccaaccgaagcggagacgtactggtt

SEQ ID NO: 89446 - DNA, 79 bp, Glycine max
  Clone ID: 700906239H1
gaatttgcttgcaactcatgggtttacaacttcaggagttacaaaaagaatcgcattttctttgtcaatgatacatatc

SEQ ID NO: 89447 - DNA, 98 bp, Glycine max
  Clone ID: 700906241H1
gcttcatcccaaaaagctcttttccttctaaatttgattccttagttcagcattctattattatatatggcttcttcttcttcctcagaaaacaaaaa

SEQ ID NO: 89448 - DNA, 262 bp, Glycine max
  Clone ID: 700906242H1
gttttgtcgagctcaccggtgttcctgttgctagcactttgatgggtcttggtgcttatcccattgctgatgataattctcttcagatgcttgggatgcatgggactgtttatgctaattatgctgtggatagggctgatcttttgcttgcgtttggggtgaggtttgatgaccgtgtcaccgggaagcttgaggcttttgcgagccgggctaagattgttcacattgatattgattcagctgagattgggaagaacaagca

SEQ ID NO: 89449 - DNA, 205 bp, Glycine max
  Clone ID: 700906245H1
tctggagggcgagaaaaagacaacagattgccttctcttcctgttcctctccctcaccctctctctctctctctccgccgcattacaactccaaacccaaaccttgcccctccactccctcgcccacccacccgctatctcaaggcccgtatccgaatccgaacccgacccagaagaagaagctctctcacttcatctccacaac

SEQ ID NO: 89450 - DNA, 162 bp, Glycine max
  Clone ID: 700906247H1
ctttcttctctccaccatcgttgtgtagtgcgtgtctatccgtaaattgccttcgactgtgacaacacaccgatcgccatgaacatcttcaccaagaaacccacggccaaagaggctctccgtgatagtaaacgacaaatgacaaacgccactagaggaata

SEQ ID NO: 89451 - DNA, 267 bp, Glycine max
  Clone ID: 700906248H1
cttcttcaaaaacacacaagcacactacactttgtctctgttctgtgtgtgcgagaaatggcgatggcaatggcgcttcgcaggctttcatcttcaattgacaagcctctgcgccctctcttcaatgccggttccctctactacaagtcgtacttgcctgatgaagctgtttacgacaaggagcgacccggagttacatggccgaagcagttgaatgctccacttgaggtcgtggatcctgagattgctgatattattgagcttgag

SEQ ID NO: 89452 - DNA, 267 bp, Glycine max
  Clone ID: 700906249H1
aagtcaggtcccaaaccaataattgtgcctattgttttgaagatggctgaatttgaccataaggcattactttcgtagtggatctctgctcggacatttaatgacaaatgtccagacctggataatgagaagcttatagccaacttgaaaaccatacaggattatctgtgctcattcacatcgcaggggttgactgtggtcaatgtatcggcaacaacatttcctcaaacattggattggctgcatggttaccttcttcagtgcatc

SEQ ID NO: 89453 - DNA, 147 bp, Glycine max
  unsure (1)..(147): unsure at all n locations
  Clone ID: 700906252H1
agacaacacatttctgcacaatataatagaaagatntctccatcacgtaaaaaatgggcactagtttcatgctaatttctccaccgtctctgctcaagcctcaccaagtacccctcacgactccattccctcttcctcaaacccatc

SEQ ID NO: 89454 - DNA, 264 bp, Glycine max
  Clone ID: 700906254H1
ccttctccccagttctcaaagcttacctagtattttcgtttctgaacccaattaattaagcacacaaggatcataacatacctatacctcgatatcacaagtcttatggaggcagagcgagacaagtacaagatgatcaactttgaagaaaccgagttacgactcggcctcccactcagtggaaacgaaacgctcacaaccacttggagcactgggaagagggttttttcggctactgccgtggatttgaagcttaagctttcc

SEQ ID NO: 89455 - DNA, 250 bp, Glycine max
  Clone ID: 700906255H1
cttcaatccaattccaaagtaccgtaacgtaacaaacttgacttacgtgtgcctcatttgctattgttcatcgcaagctacctaacaagttcgaggctgaacctgagacaatggcgaatcacaatagcagattcctcttacgctccttcatccccttcttccatcgccgaatgaactcacctcttcttccttcagcaacgtcatgtcctcggttaacttcggggacagcttttgatgaaaaattcacgca

SEQ ID NO: 89456 - DNA, 69 bp, Glycine max
  Clone ID: 700906258H1
aacaacacaacacgatacaagtttcgtattcgtaacgtagacttgtttcacgcttcttgctctcctctg

SEQ ID NO: 89457 - DNA, 89 bp, Glycine max
  Clone ID: 700906265H1
cttttgctagctggctgtcggggagaggttcccagatccctctcgcaatgcacgtgactcacaccctctctctttccctgcaaacaaaa

SEQ ID NO: 89458 - DNA, 263 bp, Glycine max
  Clone ID: 700906266H1
caaaatctgcttctcatgatgcctttgctgtattaattcatctcaaagctccacattcagggagaaaacaaaataatgatgcaaacagtactgaatcatcacctctggttgagaactctcgtgcctcagttgaccttgttacagttcttgatgtgagtggtagcatggctggtactaagctagcgttgctaaaacgagctatgggttttgtcattcagaatcttggtccatcagaccggctgtctgtcattgccttctcctcc

SEQ ID NO: 89459 - DNA, 257 bp, Glycine max
  Clone ID: 700906267H1
taataataaccccctttttccctctccatacccttttgctttctttatccaataataagaacttcccacgagtggctttaactggtctggtctggtctggtcggacacacaaaaatattagtatggagaaggtgagttttgtgaagaatggagagcttagattgcctccggggtttcgtttccacccgactgatgaggagctggttttgcagtactagaagcgcaaggtcttctcctgccctctgccagcctctatc

SEQ ID NO: 89460 - DNA, 254 bp, Glycine max
  Clone ID: 700906268H1
aattactgagggggagaaatgggagaaccctaaggatcctgatgaagtattggttaagtatgaagttcatctagaaaatggaaagcttttagcaaagtctgatggggaggagttcacagtcagagagggtcattattgtcctgcattgtcaaaggctgttaaaaccatgaagaagggagagaaagtgcttttgacagttaagccacaatatggatttggtgagaaggggaagccagaacaaggggatgaaagtg

SEQ ID NO: 89461 - DNA, 182 bp, Glycine max
  Clone ID: 700906270H1
aatttcttccatcagatatattttcttcaaaaacaatggcaggcgaggtggtgaagaaggaagactctctcaacctgaaagtcactaacaagagtcatgttcaacctgaggagaaaattggaaggacagagtaccagctggtcacttttgatcttccctacttggccttccacacaacatag

SEQ ID NO: 89462 - DNA, 95 bp, Glycine max
  Clone ID: 700906272H1
ctcagatatttgttgtttctttctctgttggtaattttctgtttttcatgtttttttaaggtgtatcatttgtatagacaacttttatcaggaaa

SEQ ID NO: 89463 - DNA, 263 bp, Glycine max
  Clone ID: 700906276H1
ctagaagaggagaccgtgtttggcaactcgcatttggctctggcttcaagtgcaacagtgtggtttggcgcgccatgcgccgagtcaccaagccttctaggaacccttggcttgattgcatcaacagatatcctgcacctctcaacaactgaagcagaatttgacggcactagtgttatgaatcttattatcagtgagggtatggttaggatcaataagggtagtactaatttggtcttcaaaaatgttacatctgttttctg

SEQ ID NO: 89464 - DNA, 262 bp, Glycine max
  Clone ID: 700906277H1
atcgctcaatgcttcaccttttccgcatatgctgcaaggtttgaaatcacaaaccgatgcacatacactgtctgggctgcgtctgtgcctgttggcggtggcgtgcaattaaacccgggccagtcatggtccgtggacgtgcctgcaggaacgaaaggggcccgcgtttggtcccgaaccggctgcaacttcgacggttcgggcctctatggatgccagaccggtgactgctggggtgtcctcgactgcaaagcttacggtg

SEQ ID NO: 89465 - DNA, 263 bp, Glycine max
  Clone ID: 700906278H1
cacaaagcacaaagcaaagctcatccttgagttaaaaaatggcagcagcttcttcctcggctctctcatccccatccttggctggcaaggccgtgaagctgggcccatcagccccagaagtgggaagggtgagcatgaggaagaccggcaccaagcaggtctcctcaggaagcccatggtacggcccagaccgagtcaagtacttgggcccattctctggcgagcccccgtcctacctaaccggtgagttcccaggcgactac

SEQ ID NO: 89466 - DNA, 262 bp, Glycine max
  Clone ID: 700906280H1
ccacccagaattgttgggttccattctcaaaacagagaacaagaagaagaagaaagagagagagtgaaaacgggaaaagcaaaaagttgtttctgtgattgattctctgcaaccgaatcatcatcagccacttcttcccgtttcatctctcccatttcttcttttcttccgctctggttcagtaaggcgaagagggttaacgttattcataatggttgcaacagccgctacggcgtcgtttcttcccgtgcctttgccagac

SEQ ID NO: 89467 - DNA, 265 bp, Glycine max
  Clone ID: 700906281H1
gtctcaagcaaccatggcaatggcaacccaagcctctctcttaaccccacccctctccggtctcaaagccagcgaccgcgcctccctgccatggaagcaaaactccagcctctccttctccagcccgaagcccctcaagttctccagaacaatcagagcagcagccgccgacgagaccacagaggcaccagcaaaagtagaggctgcaccggtcgggttcaccccaccagaacttgacccaaacaccccttccccgatcttcggg

SEQ ID NO: 89468 - DNA, 260 bp, Glycine max
  Clone ID: 700906282H1
gacaagggtccttctgtgtagacataccagagccagaccctgatgatgccaaaatagccaagaccatagaaaatgagttccacaaattggagaatcagaagaatggttttaccaactcactaactggtcttacagttaatggccattgaaagctatgctgctaaagctagtaactgtttttggcctctcctgagccacttttatttgttgattactttatggtcccttttggaaaaggagggttatacttgtaggtcata

SEQ ID NO: 89469 - DNA, 258 bp, Glycine max
  Clone ID: 700906283H1
cggagagtgttctcttccagctccatatgaatcatcaggcaaaattttatcagattctatctctaatggacaaggtgctgtaccactggaggctggattgactctgtcaaagtccatggtgcctgggatttcaagcgaaaaccaggatcagcccagtccaatttcagttttagagcctccatttgaagatgataatgctgttgtcgagtccttgggctgtgtgaggggtggtcagctgggatcacgggtgtctctgaa

SEQ ID NO: 89470 - DNA, 256 bp, Glycine max
  Clone ID: 700906284H1
gggccatgctcggagccttgggctgcgtcttcccggagttgctgtcccgcaacggggtgaagttcggagaagccgtgtggttcaaggccgggtcccagatcttcagcgagggtgggctcgactacttgggcaacccaagcctgatccacgcccagagcatcctcgccatctgggccacacaagttatcctaatgggtgccgttgaaggttaccgtattgctggtggccccctcggtgaggtcactgacccaatcta

SEQ ID NO: 89471 - DNA, 258 bp, Glycine max
  Clone ID: 700906285H1
agggactacatgctttggtttatgatatgaattcagcaaatgaaacatgggagtgggttaatcttaaagaggtaaaattttacaatattaatattcttccgtctatcattcacatacaatctagttttagcttggttctttcttttcttttctttttaagcaatattttcctcctgacaagcatagccagaaccttttgttttcacatatcttacatttcccatggtgaccttgtgtctcttactttgaatcccatac

SEQ ID NO: 89472 - DNA, 255 bp, Glycine max
  Clone ID: 700906286H1
ctcgagccgtggtcactgacctatcttggaagagttttgaagtttaaaccttcaaacccttatgcctttagattctgattctgagtctctgctgctatatatggcgccacgcgtatttcttgtgttggggatgttgctgatggtgtgccttgttaaggtttcgtctgatccaaagagagaagaagaaatactggaagaagaactacattttcccgataacgagccacttattgtgagagacgggaacagaaggct

SEQ ID NO: 89473 - DNA, 255 bp, Glycine max
  Clone ID: 700906287H1
caaagtcaacgactgcatgaaatggtcttgaaacatcctatagagattgatgaccttttgcaccttattgcgcaatcaaagctatctcttgttgcaactgcgaaggcaactcctgttcttagtgcattggcatcgttggaaaaggaaactagtggcttaatcataattggaccagaaggagatttcactgagaaagaagtgagtatgatgatggaagcaggtgctacagctgttagtcttggacctcatcgtctt

SEQ ID NO: 89474 - DNA, 256 bp, Glycine max
  Clone ID: 700906289H1
caggacccctgcctcctcccgccgccgtcaaagccggcgcgttggctctcttctctctcctcggaatcccactcgcgattacttacagcataccctttgctctagcatcaatattctccagcacctcaggggcaggccaaggtttgtctctgggagtgctcaatcttgcaattgtcataccacagatggtggtgtctgtgataagtggaccatgggatgctctatttggaggtggtaacttgccagcgttcgtggt

SEQ ID NO: 89475 - DNA, 258 bp, Glycine max
  Clone ID: 700906296H1
ctttgttctttctggagggaaggacaagtgtgtggttttatggaatgttcatgatcatatttcaactttagcagtagaaacagcatccaatgttaaacagggctctaaaactgggggcaataatacaaaagctacagaaagcccttgtattgaaccaaggggcatttaccagggtcatgaggacactgttgaagacgtgcaattttgcccatcaagtgcgctggagttctgtagtgtaggtgatgattctcgccttat

SEQ ID NO: 89476 - DNA, 286 bp, Glycine max
  Clone ID: 700906302H1
cctacgaaacaggctgttgccaagcccaaggccaaagctgcggccacgactgccaagcccaagtctaagcccgctaacgtcgcggccaagaaggtcgctgctaagccagctaagaagaagacacccgtaaaggccgtgaagaagcccaagagtgtcgtgaagaaacctaagagcgtgaaatcaccagcgaagaagactaaggctaaggctaagaagtgatgatttggattggggtttggttttggtttggcgttatagttttatgcattccgggttcattcgtagt

SEQ ID NO: 89477 - DNA, 279 bp, Glycine max
  Clone ID: 700906303H1
ctcccctactatctattgggcttgtcattgtgggtgcaatcctcctgattggttattgttacagcaattcaggtggagctagcggtggtattaaggatgtaaaacttgaaggtggcgcatcgtgctcattggaagtcctacaagcattgcccattttgaagaaagcatatggagacagcatgcataaggttttgcatgttggccctgactcttgttctgtggtatctagtttgttagaagaaggggatactgaggcttggggaatagaaccatacgagt

SEQ ID NO: 89478 - DNA, 194 bp, Glycine max
  Clone ID: 700906304H1
tttgattgcagatgtagtgtagtcctaacgcaaccttattttctcattcgtcgtcgacaacgtaaatctccattatagtctgttcgtgcttcctctggtattcttctttttgtagtgctgttctgttctcgttctctctctactaagatcaccgccatgatcttcgaatcacgatccctcctcttcacgctcct

SEQ ID NO: 89479 - DNA, 279 bp, Glycine max
  unsure (1)..(279): unsure at all n locations
  Clone ID: 700906305H1
cccctatgttccagacaccgatgaacatatncaatttccgcgaacgataaatcataatggcacctttcttacgttctgttactattagcctcttcattgactcaagggtatgctcaatttcaaccaaaaaacgaagcttttatatccttgttgattacccaaaatggccttgactttgtgaaggagttgctggtgaacaaggcaatttcctcactggtctcacttcgattgccgaatattgaaaagactgcgaaaatcccagttgtgggtaatgtctac

SEQ ID NO: 89480 - DNA, 266 bp, Glycine max
  Clone ID: 700906309H1
agcagctcgaattgtgagtgacggctgttttgattgttgattgctttgaatcactgagataacagggagtaggagtgcttgttcttgttgtattgtgtgtacaaaacctgaggttattctattcaagttgtctttggatgtcagtcatgtgcagcaagaaaatatagccaaaaaattcattggtgttggagattctgtagaatttgacaaaggtgtagcctgtccaaggttacctatttaattttgggttggaatttgaagataca

SEQ ID NO: 89481 - DNA, 265 bp, Glycine max
  unsure (1)..(265): unsure at all n locations
  Clone ID: 700906310H1
gttgtgtttcttgaaccacagtctaagaggctttttgtcttctattggtgngtaagcgattcagtctcgctaagccacccatcttctattggttgaataagcctgggataagcgagtcagtctcgcgaagcccaaagcatttttaatttctgagtttttgttcatgcgctaagcgcaatttcttctctgttttgttttattttggaattgagcttagtgatcctgctcgctaagccaattaagttccagtagttattttgggcta

SEQ ID NO: 89482 - DNA, 267 bp, Glycine max
  Clone ID: 700906313H1
caacgaggagttgaaaacaattgggtccaacctttggaaggaagagccaaagtgtctagaatggcttaactcaaaagaaccaaattcagtggtttatgtgaactttgggagcattatggtcatgactagtgaccaattgacagagttagcttggggacttgcaaatagtaacaaaaactttttgtgggtcattaggcccgatcttgtggcagggggaattaattgtgcgttacccaatgaatttgtgaaagagaccaaagatagagg

SEQ ID NO: 89483 - DNA, 270 bp, Glycine max
  Clone ID: 700906315H1
acagactacagaggcttccttggcagatcagagggagagagagagtgtgaaagttggaatggcgaaaaaggcagtgttgatcggaataaactacccaggaacaaaggcggagctgagaggatgcataaacgacgtgtggagaatgcatcgctgcctgatcgagcgatacggtttctccgaagacgacatcaccgttttgatcgacacggacgagtcctacacggagcccaccgggaagaacatccggtcagcgctgaccaggctggtccg

SEQ ID NO: 89484 - DNA, 282 bp, Glycine max
  Clone ID: 700906317H1
gtcatagtggtttatatatgcggtgtgactgagctgaaggaggaatttaaggggaccgtctaatggaagtcgggggaaggttgtcttactatttgatgataatcccttgtctaaaattggtgtgagatttgataaacccatacctgatggagttgatcttggtggtgcctgtgagggaggtcaaggatttttctgcaatgtcaccgatcttcgtttggaaagcagtgctgtagaagaactggacaaattacttattcattcattgtttgaggttgtttttag

SEQ ID NO: 89485 - DNA, 280 bp, Glycine max
  Clone ID: 700906318H1
aatttcacatgcatttccctctctaaccatatttacaacatccaaacagggacttaattaaatgactagaacctcagttatgaagctatcccacgatgtccgccaagaaccgttcccagtgatgcgtcgctacatcgttagcgaccccattcgctaagaggctatcgagactgccgcacgtgttcgcgaaaatactagagcttccttttccttcagaagacgacgtttccgtggaggaaacgccgcagttttttcggttcgtggcgtcgtgcaatgccga

SEQ ID NO: 89486 - DNA, 280 bp, Glycine max
  Clone ID: 700906319H1
ctcgctcttaaatttcatcttccgacactcatcaaacataatctatacctttgactcaaccacatgaacgaggattgcaattccagaacagcgtcgctgttgttgtcctcatcctcctccccttcgaattccaagatcgtgggagataagcgtggaagctctcacgcgggtcacggcgctcggaaacgggttaagatgaaagatcttgacgccgttgttcactctgtggaaacgaatagccgttattcgggattcaaaaacgacaaagaaaacactgtgc

SEQ ID NO: 89487 - DNA, 277 bp, Glycine max
  Clone ID: 700906320H1
gaaaggtcggaacataaggcggggaagagttagtttcttctctcttcgatggaaggcggggaagaggttctcccttcggccactgccacctccgccgccaccggcaatcccaccgcttcgcctcctccgctcgctgatcttgtcggtgctcccgatctcgctcctgcctcggacgacgtcgttacccaacctgaaattcacgcgctgatttcagacgaagagcacgatcacgagcatgaacatgacgatgacctcgagcacgagcacgatcagcatg

SEQ ID NO: 89488 - DNA, 274 bp, Glycine max
  unsure (1)..(274): unsure at all n locations
  Clone ID: 700906321H1
gctcccaccacattctccaccacgacttcgactctanctatggccacccccctgttctcgccacctacacccctccctcccattgccacttcaacaccttctccaaaatcgtgctccagtggaacgccacgtgcaaaggaagacaatttgaccgcatttttggtgtgtggcttggtggggttgagcttctcagaagctgcactgcagagccaagagccactggcattgtatggagtgttgaaaaggacatcacaaggtaccgttctttgttgtt

SEQ ID NO: 89489 - DNA, 267 bp, Glycine max
  Clone ID: 700906322H1
ctcaccctcctcttcacacattttctgtgcgctctaacaaacattctcgttcacactttcagattgtgtgaagatgggggcgggtggccgaactgatgttcctcctgccaacaggaagtcagaggttgaccctttgaagcgggtgccatttgaaaaacctccatttagtctcagccaaatcaagaaggtcattccacctcactgtttccagcgttctgttttccgctcattctcctatgttgtttacgacctcaccatagccttctg

SEQ ID NO: 89490 - DNA, 270 bp, Glycine max
  Clone ID: 700906325H1
aatcaatccctcatctcattgctgagatctgcaagctggctatggactacgaaccctacgacagtagcggaactgatgatgaccttccaccaacccatcaaaagagaatttccaggggaggaggaggacgtctcgctgggaatgggagatctgctgttggttcaattccttacccaaggatgtatggtgaaattgtgaattggagacccaaattcatcagcttgagcaagaagcatacagttcagttctaagagcctttaaagctcaagc

SEQ ID NO: 89491 - DNA, 268 bp, Glycine max
  Clone ID: 700906326H1
gtatgcacaaggcgtacctgaagcccgatccaaggaacgagatactcgtgtcggccggtgcacttggaagcccacaacttctaatgttgagtggaattgggccggaagagcaccttaaagcccacaacatcagaataacattggatcagccattagtaggacaaggcatgtcagataaccccatgaacgccatcttcgtcccatctcctgtccccgtagagatcgctctgattgaggtggtgggcatcaccacttctggcacctacat

SEQ ID NO: 89492 - DNA, 267 bp, Glycine max
  Clone ID: 700906329H1
gggagtgagtcactcttcctgcagaacccagatctgtagacaatatgggaggcactggtttgctacatttgatatgccttgtcattgctttagtaagtgtgtcgcttgtgcaagcagaagatgcgtataagtatttcacatggacggtgacttatgggactctttatcccttggctagtccccagcaggttattcttatcaatggtcagtttcctgggcctagacttgacttggtaactaatgaaaatgtaattctcaaccttatca

SEQ ID NO: 89493 - DNA, 267 bp, Glycine max
  Clone ID: 700906330H1
ctcttatctctctcttacacaccgaagcactgctactactactactttctctctagatatgggttctggtgctgtgcaactgtttctgatcttggggctcttggctagctcatgcttagcccaagcaccaggtgctgcaccgtcacaaccacccactacaaccccatcaccaccaccacccagatcagcacctgcaccagcacccaccacaccagcaaccccaccaccagcaaccccaccaccagcagcaactccaccaccagcagc

SEQ ID NO: 89494 - DNA, 266 bp, Glycine max
  Clone ID: 700906331H1
cagagtgattggtgtgagtgcggcaattactggaacagcggttgagtgtgctctcgagaaagcagagaaatggggttggaatcggtgggagatttagcgattcacgtgattctcagtaagttaggagcccaagacactgccagagtcgcgtgtctgagcaaaaggttctgttcttccgcttccgacgacactctctggatcaatcactgcttccacgaactcgctctgtcacaacccctcgatcatctcggaaaccctctctcttc

SEQ ID NO: 89495 - DNA, 279 bp, Glycine max
  Clone ID: 700906334H1
aagaagtgttttctggatcaaccgttaagaagggtgagatagaagcagtggtgattgccactggagtgcacaccttttttggcaaagctgctcatctggttgatagcaccaaccaagttggtcacttccagaaagtgcttacagtaattggtaacttctgcatttgctccatcgcggttggaataatcattgagctcatagtcatgtacccaatacagcaccgcaagtacagagatgggattgacaatctgttggttctcttgattggaggaattccaa

SEQ ID NO: 89496 - DNA, 276 bp, Glycine max
  Clone ID: 700906335H1
acttactgctgaaattgataagctgagagctgaagttgagaaggctgaaaagagtcttgatcatgcgattcctggtgatgtgagaagagggttgaattcagttaggaagatctgcagggagtataacatttctggagttcatggtccaattattgagttgctgaattgtgatgaaaagtttttcactgctgttgaagttactgcaggaaacagcttatttcatgtggttgttgaaaatgatgacaagtcaacccagataattagacatcttaattc

SEQ ID NO: 89497 - DNA, 276 bp, Glycine max
  Clone ID: 700906336H1
gtaggcacaaggcgtacctgaagcccgatccaaggaacgagataatcgtttcggccggtgcacttggaagcccacaacttctaatgttgagtggaattgggccggaagagcaccttaaagcccacaacatcagaataacattggatcagccattagtaggacaaggaatgtcagataaccccatgaacgccatctttgtcccatctcctgtccccgtagagatctctctgattgaggtggtgggcatcaccacttttggcacctacattgaagctg

SEQ ID NO: 89498 - DNA, 274 bp, Glycine max
  Clone ID: 700906337H1
caaaggttgctgtaggtagatgtgtattgcagtagtgctaagtgctaatacgtgcagtgaacaatggattctgcatcagcatctctgctcaagtcttcacttgttcttgacaagtctgagtgggtgaagggacaaacccttcgtcaaccttctgcatcagttgtgagatgcaagctcaccaccccatcaggcctcagcatcagagctggttcctatgctgatgagctcggaaagatcgcgacaacagtggcttcaccatggaagggtatgttgg

SEQ ID NO: 89499 - DNA, 269 bp, Glycine max
  Clone ID: 700906339H1
atcggcgcggcacccacacacacagttcgtcggaatgggaagggtgattcgcgctcagcgtaagggtgctgggtcggtgttcaagtctcacactcaccaccgcaagggtccggcgaggttccgcagcctcgacttcggcgagcgcaacggctacctcaagggcgtcgtcaccgacatcatccacgaccccggtcgcggcgcccctctcgccaaggtggcattccgccaccccttccgctacaagaagcaaacggagctcttcgtcgccg

SEQ ID NO: 89500 - DNA, 247 bp, Glycine max
  Clone ID: 700906340H1
ttcggctcgagtcgaatgacatcaattcgtaggtgtatgaatatgtctcatgctactacaagtcagatgtagcaattcaacaagatgccgagcttcaagcttggtggaaagaacttgtccaagtgggtcatggtgatttgaaagataagccatggtggcaaaagatgcaaactcgtgaagagttgattgaagcctcggctaccctcgtatggatcgcttcagcccttcatgcggctgttaactttgg

SEQ ID NO: 89501 - DNA, 251 bp, Glycine max
  Clone ID: 700906342H1
ggggtacaagttttgtataaatgtagtcgtaatatatttgtgtggtccctacatgaaaaattgcttacaagttagaccttactgtataagtctaaatggtgttagtttatagtagtattcatataaaactaaaattgatctgtcgggtgtagggaagtgtataattttcgctttatatctaaaatgaaaaacgatgttattttgtaaaatagagaggggccgaatctaataccgttgtaatgtttccacac

SEQ ID NO: 89502 - DNA, 268 bp, Glycine max
  Clone ID: 700906343H1
cataattcttttttttatttcttggtggaaaacagattgtgcatctaattccaaattcacccataaaaatacttccttttgctcaccagccatatattatgatggagggagatgagaatattcaagcatcatcaaagggaaaatatgttgaaagcttcaactgctcggaggcaccaaggaagaaaagcaagaagatagaaaacaagaggaggtttagtgatgaacagataagatcactagaatgcatatttgagtcagagtcaaagct

SEQ ID NO: 89503 - DNA, 267 bp, Glycine max
  Clone ID: 700906344H1
atttttgttggttcgagtgagcgagggaagatgtactctagagattcatggggtggtccgttggagataaacgcgacggactcggcaacggaggacgagcggagccggaacctgcaggacgtggacagggcggcgctgtcgcgtcccttggacgagacgcagcagagctggctcctaggccccggcgagcagaagaagaagaagtacgtcgatctcggctgcatcatcgtcagccgcaagatcttcaagtggaccctcggcaccctc

SEQ ID NO: 89504 - DNA, 267 bp, Glycine max
  Clone ID: 700906346H1
catttccgttaccgttatcctcacttctctctctctcaacctcttatttatttattaaccctttattccacccctttcctctcccttcatcaagcacccaactttctgccacccccacaaaagggtgcttgcgtttctttctgtgatctcaaccatgaagcgtccactcacaccttcagccagcggcatgaagactaacaagaaagccaaggcgatggaaaatgacgaagacgtggaggggctggggcgtttcgacgacaaccttct

SEQ ID NO: 89505 - DNA, 265 bp, Glycine max
  Clone ID: 700906347H1
aaagaagaaaaaaaaaactcaaacaccttcaagaacttgtatctttctttgttagtatttgttactacaattttacattcttttcatctctacatatttcattagtcatggcacctcaagcagtttccttcaagtccttcgccgttgctcttattgtggcgcttttcttctccgcctccgctctggacttagtttcggggcagtcgccggtgccggcgccggcgccggcaccagattgccggagcagctggatccgtgtcgagct

SEQ ID NO: 89506 - DNA, 278 bp, Glycine max
  Clone ID: 700906349H1
tgatgtgaaggaggagggagaggaggaggaggatgaagaagaggaggaggggttgaaggaagaggtggatgcaaatggggacgtgaagatgggtgagattgatgaggggcaggttcaggagttggaggagcaccgcattgagttgagtctcgggcaagataataatgttgagagggttgaagttgagaaggagcagggtggagaggagcagatgatggatgtgggttttgagcagtctaaggaggaggatatgcctggaatgtggcttttggatcaga

SEQ ID NO: 89507 - DNA, 274 bp, Glycine max
  Clone ID: 700906350H1
ctcttgtgctggtgaaaatcatgtacatacatttcaggactatttagtaatagatgatggatttttgctctggtatgttgttttccttcctgtaccatctatttccatttacaatggtttgttcctatccttttagctgccccattaaattgggggctatcaagacttgttcttttttctcctacatttaatctttacaacaggaaatgctcctgaaaattttggcttcattgatgcacaagcattggtagctgttggatgtgtagaaaaataa

SEQ ID NO: 89508 - DNA, 275 bp, Glycine max
  Clone ID: 700906351H1
aaccttcgatcttaatcccacggggcaacgttccatctgttgaacttcttcttttatatgtactctgtgatttcgctacaccctcactccgcttcgccaccctatgggggacaacaacagcaacaacgatgccttcatgcgcaaccaaaacgccgccgttcaggcccgcaccaaagcgcagaaccgttccaacgtccttcagctcaaactcgatggacagagtcacccaaccggtctaacagcgaacctgttgaagctcttcgagcctaggcctc

SEQ ID NO: 89509 - DNA, 270 bp, Glycine max
  Clone ID: 700906353H1
atcaccctcgcctccggtgcccgccacgctattctccggttaccctccgaagcttccaggttcttcaaagcacctgctaatgccgatcaaaacgatgagggcaccaggtgggccgttttagttgccggttccaatggctactggaattacaggcaccagtctgatgtttgccatgcatatcaactactgaggaaaggtggtgtgaaagaggaaaatattgttgtatttatgtatgatgacattgctttcaatgaagagaacccacggcct

SEQ ID NO: 89510 - DNA, 261 bp, Glycine max
  Clone ID: 700906354H1
ctccaaccccaacaagtattagtaaaggcaaagaacaaaacaaaacatggacgaatggcgcgccaccatcaaaatggatcacagaacccaacgaacttagaaaacctaaccgagtcctccatcagtcatattcccaacgaccgttcagaatgattgatggtagcgatcatgcaacagcagcagcagcatcaacagcaacagcagaacccctctgcactggtgccacctcagctcaagaatccccaatcctccacacatcat

SEQ ID NO: 89511 - DNA, 267 bp, Glycine max
  Clone ID: 700906355H1
ggaactgttcctttaactgaagattttgcatatgggcatgtcttctacaagttaagacagacaagtgatttgttttgtatttgagaacgcaaagtaactgtttcgatgatgggaaaagcatatctgcctgtctgcccttagagaacaagtcttgaatagatttcggtaaattaaaaatgctcttgctgatcctcttttggaatgattaataaaacattacattattgtatcttctacttcgaccgccgttgtggacaaaatttgtaa

SEQ ID NO: 89512 - DNA, 268 bp, Glycine max
  Clone ID: 700906356H1
gttcgaagtccaaaacgtgtgcagataaagtttgaggaaggcataattggcactccacagcttacggactcattagagataccggaaaatgtggaatttctgggtcaaaagattgaccttacacttttcaaaggcatccttacctctgtccaagacacagccacatcggtagtgaaaacaatgtcaagtaggcctcccttgaagatcccaatttccaacagcaatgctcagtcctggttactcttcacatacctcgacgaagaattgc

SEQ ID NO: 89513 - DNA, 259 bp, Glycine max
  Clone ID: 700905724H1
attgacacccttggacctggtgctgtaaattttatcatagatcatgcagaagtagattttgtgttcgtccaagataagaaggttaaagagctttcaaatcctgaatgtaaatcctcaaagcgactgcaagccatggtgtgcttcactacattaacagaggaagagaaagctaaagccacagcaattggaatttagccatattcgtggcatgaattcttgcacttgggaaaagcgaacccaaaaagtacttttccacctc

SEQ ID NO: 89514 - DNA, 260 bp, Glycine max
  Clone ID: 700905726H1
cacacacaactcgcatctcagtcagcatgtcttaatttacttggtgtcaacggtgccaacaaagaatctccgggtgcaaattctaggctacctggccaccattgtagccggttcagtcctcgccggggagctatcgctcatgtctgctattgcagctggacaaccttgttaagagccacatgaaatacaacagatctagcagggatatatctacaactgtccaatgaactggccacagtacacttaaacttgtgtcagag

SEQ ID NO: 89515 - DNA, 261 bp, Glycine max
  Clone ID: 700905727H1
ccacacccccctagctacagagcagccaccaggggacgaataataataagcctatattctaaggccggaaaaatacaaaaggaataacaccaatgtctggaaaggtaattatctcggctgtttctctcatcctggtggttggagtggccataggtgtggtggtggccgtcaacaacaagggcgaggatcccacacttcaatctcaacaaaaatcagtaggggttatctgccaaaacactgatgaccagaagctctgccacg

SEQ ID NO: 89516 - DNA, 267 bp, Glycine max
  Clone ID: 700905728H1
aaaaatctctacagaaatccaccacaccaccaaaccaccaaccaaccatatggaggtgctaagggtgcaaaccatagcttccaaatccaaagatgctgccatcccagccatgtttgttagggcagagacagagcaaccaggcatcacaaccgttcaaggggtgaaccttgaggtgccaattattgattttagtgacccagatgaagggaaagtggtgcatgagattttggaggcaagtagggactggggcatgttccaaattgtgaa

SEQ ID NO: 89517 - DNA, 258 bp, Glycine max
  Clone ID: 700905729H1
actttggttcccctccaattttatccctccccctcactagcactcaccacatttcttcatcatcacaaactccaccaccaactcctcctccacaatctcagcctccaacttcgtctccacagcagctaagaacaacaaatttgaatgatgaatcaatgcaagtgtgcactgaagctaagcaacagaagcccatcaaaccatccactaaggttgaatccacagattggatagccacttccttgaccagaaggtttggga

SEQ ID NO: 89518 - DNA, 257 bp, Glycine max
  Clone ID: 700905730H1
cgagcaaaactgaaagcaaaggctaactcggagtgcaacacaaccacaatctcatcgttccaatcattatcggcacttgtttggagatgcataactcgtgcgcggcgcttgccgtatgatcaaagaacaagttgcaagttgtccgcaaacaacagaacaagaatggaaccaccactgcctcaggagtactttggaaactcaatttatacactgaatgcaggaaccgccacctcagggaaattgcttgagaatggtat

SEQ ID NO: 89519 - DNA, 261 bp, Glycine max
  Clone ID: 700905731H1
atctttcattaccaacgtcacaaccacaacccctttgtattctattccaattacaaatgcccttgttctctgtgtctctgtttattctcatttcacaactcatcaatcccctctctctctctcccacacgcaaaacctaagcatggctcagaaggcccacaaaaacgacactgagtttaaggtccccgaacccatcatcaacccctgcaccaccaccaccaccaccaccacctcgatttccgaaccttctagattcttcga

SEQ ID NO: 89520 - DNA, 265 bp, Glycine max
  Clone ID: 700905732H1
cgatctctatccaagggatttggcttgtattatttagcttcgttttgaagagttcatttaattttcacaaaattttgaagcagcaccaccactttttgttctactacccatttcatggaagagaagtagaaaggggaatgctttttgtccaagttggaaaacaaaattatatttttgaatatttctttgctcaatttcattctctacatgcaatgggatataaactacgtgtgataccctgttctgccccaccaccatcatttta

SEQ ID NO: 89521 - DNA, 256 bp, Glycine max
  Clone ID: 700905735H1
gtttgcagtcactgctttgtttagatcagaaccagatcgtgttctgttcttccattggcaaacatggcaactcaaatgagcaagaagagaaagtttgaggcggatggagtgttcttcgccgaactgaacgaggttctgacacgtgagttggcggaggacggttactccggcgtggaggttagggttacgccgatgcgcaccgagattatcatcagagccaccagaacccaagccgttctcggtgagaagggaagga

SEQ ID NO: 89522 - DNA, 255 bp, Glycine max
  Clone ID: 700905737H1
caatcccacacgcttcttactcatctcataacttttctgctccccgttgagaaagatttgaatccacaggaaaaataacgctaatggctccaagagacagccgagccaccgcgctcattgggcccggcccaagcctatcaccggcccacaaagagatccgctacagaggcgtcaggaaacgcccctggggccgctacgccgccgagatccgcgatcccggcaagaaaacccgcgtctggctcggcactttcgaca

SEQ ID NO: 89523 - DNA, 257 bp, Glycine max
  Clone ID: 700905738H1
tccatccgttcttcatgttctacttctatctccctaccatactcattcaaacagacatgaaaattatggaatcattagctcttatccttctacagtactcttgttttagctacgatttcagttccagcaactaactccagaatcatccatcaaaaaaacaatgccaatctgattgaagaaacttgcaagcagacaccccatcacgacctttgcattcaatacctctcctccgaccctcgcagcaccgaagcagatgt

SEQ ID NO: 89524 - DNA, 256 bp, Glycine max
  Clone ID: 700905739H1
gacggagcaaataaagcacagaatagttgaagtgaatggcataaaaatgcatgttgcagagaaaggagagggtccagtggtgttgttcctccacggcttccctgagctctggtactcatggcgccaccagattctctctctcagctccctcggctaccgcgccgtcgctcccgatctccgtggctacggtgacaccgaggcaccaccttcaatcagcagctacaactgcttccacatagtgggtgatctcgttgcg

SEQ ID NO: 89525 - DNA, 254 bp, Glycine max
  Clone ID: 700905740H1
attccaatcatgatgatgaacatacttttaaggagttcaactcagtgcagtggacatctgaaaatccgcccaagattcttgtaccaattgccaatggttcagaggaaatggaagctgttattatcattgatattctgcgaagagcaaaggcaaaggttgtggttgcatctgttgaagataaactagagattgtggcatcgcgcaaagttaaactggaggcagacatgctccttgatgaagcaaccaaactttca

SEQ ID NO: 89526 - DNA, 258 bp, Glycine max
  Clone ID: 700905742H1
cagaaacttcttgggattgcatttgtggtgtaaatcaggatgcatccaatataagtgtatatttttgagagatttctctatcctcgaaatagcatctcttatttttttcacaagtgccggcgaaggttgcactctggtcccagtgcatttgtctgtgaacagatctgatatgataaagtggctgctgtaggatgactgttgaagcatgatgcctacaatttggagacaaaggactgctacttacagtttgttttttgg

SEQ ID NO: 89527 - DNA, 256 bp, Glycine max
  Clone ID: 700905743H1
actctgatacaaaaacaacaagaactaaacacccttctgtttgtgtatgcaaagtgtcaaacttttccacctcaaccacccccacacccaccttgctgcaaagttgcatatcaaaaactttgcatggggggctgattcttgcagcttccgttgtaaatggtggagctgccacagctttaacgtacgatgaagccctgggacaacctttgagcctccctggtgctggggactttgatgtgaacggttttgtggagag

SEQ ID NO: 89528 - DNA, 256 bp, Glycine max
  Clone ID: 700905745H1
agcgcaccaacagccaagactctgacttacctggcccaggagaaaaccccagaatcgagcttcgttcgggacgacgaggagcgtcccaaggttgcctacaacgaattcagcgacgagatcccagtgatttctcttgccggaatcgacgaggtggatggacgcagaagagagatttgtgagaagatcgtggaggcttgcgagaattggggtatattccaggttgttgatcacggtgtggatcaacaactcgtggccg

SEQ ID NO: 89529 - DNA, 253 bp, Glycine max
  Clone ID: 700905746H1
tgaaagcaaagcaccccaccgcgctctttgcctaaccgactcactcccatggaatcccacacacacgacgccgtttttcccgacaaagatctcgacgacgacgacgaaactccagaggatgaagaggaggaggaggacgacgacgtcttagatgacgatgaaaccgaaccccctccctccgtcatcgccgtcgcgccgcccgcttcccaaacgctcgacaccgcgttaattccgatctcctccgtcgcggatt

SEQ ID NO: 89530 - DNA, 252 bp, Glycine max
  Clone ID: 700905748H1
taaggtaaaccaagattgaagccgcccttaccagccaatgctgggttgtatggatgtcctacccactgtcacaaatgtggaaactgttgctgtttctccaaccattctaaggcgtgggcctgaatggtttgccagttttggtaggaagaacaatgctgggacaaagttgttttgtgtgtcggggcatgtgaacaagccttgcactgttgaggaggaaatgagtactccactgaaggagttgatagagaggca

SEQ ID NO: 89531 - DNA, 261 bp, Glycine max
  Clone ID: 700905749H1
atggatttaaccccaagtccatatcaatctatatatatttgcagaatatcattgttttgttcaactatccttatctgttatatctcaccacctaagtttattatcactcaaaacccacaagctagcaagctaccttgcaaagcaacacatggcttctacagacaagcatggcgacactgaatacagaacatcatcttcaactccagctcctgcgggtgttgattactttaaatttgatgtcatcctaaggtttgtgttatt

SEQ ID NO: 89532 - DNA, 254 bp, Glycine max
  Clone ID: 700905750H1
tactattctcctcattgcttcatttttaaacctagctccatctccctccactcaccataccaccacaaccacaagccaatgctgccaacaccaacttctgtgtaaatgttagcaacaatggctacattagtgctaatgaccccttgaactggggtgcggcggcggaggctatggctgggagccacctcgacgaggtcaagcgcatgctagaggagtaccggaggcccgtcgtcaagctcggtggagagaccctg

SEQ ID NO: 89533 - DNA, 255 bp, Glycine max
  Clone ID: 700905751H1
gaacctcgatggacagcgtgatcaaagcgttcaacatgagcgacaggctgacggtggaacacggcaacagcagcgccggaatgaagatggctctggaggattgcaaggacttgttgcagtccgccatccacgacctagaggcctcaggcgtgttggtcaaagagagcagcctacaggacgtgcaccagcgcaccgccgagctcaagaactggttgggagccgttgttgcctaccagcaatcgtgcctggacggct

SEQ ID NO: 89534 - DNA, 254 bp, Glycine max
  Clone ID: 700905752H1
atcaactcaagtaaggattttgtctttgagaaaatcgtatcttacacccaccagcaaacactttgagtgagagaagagaaattaagagagatactcaaattagattcaaaagagatggccatcaaccatgaaacttgggctttcattttcggtcttctaggcaacgtgatctcatttatggtgttcctcgctccattaccaaattcccactacatctacaagaaaaaatctacggatgggtttcaatcactacc

SEQ ID NO: 89535 - DNA, 253 bp, Glycine max
  Clone ID: 700905756H1
gaaagataaagcattccatagcctcccatcaaaaatcgaagaatactatcttctctgctctctttctactttgtgccttcaccacctcatacctaccttcaaccaccgcggtggtcgataccgacggtgatattcttcagaatcctggcacatactttatcttgtccgtttttcgacccggcggcggagtagaattcgccgccactggaaacgaaacttgccctctcactgtcgtgcagactcttcgggaggg

SEQ ID NO: 89536 - DNA, 256 bp, Glycine max
  Clone ID: 700905757H1
aatgtcttggctccttataattgtgtttctcagcctcacacatggtagtttttcagagacctaaccacgacaagaagcttacttatgctgttgtggttggcactgtctactgtgacacatgttctcaacaggaattctccattggaagtcatttcatttcaggtgcctcagtagttgcagaatgcaaagatggaaattcaatacaaagtttcaagaaagaagtgaagacaaatgaacatggggaactcaaagtgca

SEQ ID NO: 89537 - DNA, 249 bp, Glycine max
  Clone ID: 700905758H1
ttcatcttctggttttggatcattcagcgccacacagacatacatggctcttgagtcagctcctgattcagctgacatcagaggagttcacactcatggtggaggctatgttcagtataatatctatggaaacctctttgaggtctctaggaagtatgtccctcctattcgccctgtgggacaaggagcatatggaattgtttgtgctgctgtaaatgcagagacgcatgaagaagttgccactaagaa

SEQ ID NO: 89538 - DNA, 253 bp, Glycine max
  Clone ID: 700905761H1
agcaaagatgacaggtgggatgtttggaaggaaggggcaaaagataaaggggacagtggtgttgatgccaaagaatgtgttggacttcaacgccataacctccgtcggaaaaggcagtgctaaggacaccgccaccgatttgttgggcaaaggcttggacgcattaggtcatgcagttgatgctctcactgccatcgctggccatagcatctctcttgcagcttatcagtgctactcagactgatggtagtgg

SEQ ID NO: 89539 - DNA, 251 bp, Glycine max
  Clone ID: 700905762H1
ggcttcttctacatcacatccacccttccaacccctcctgaacctgtctgcatccattcccatttgatcttccgcatgcatgttcccaacgtctacaaaacctagcaaagcaacaaaacggcgtcatgcttgggaagtagcatgcaatggtaaccctagaaataggagggacattctgatcggccttggaggactctatggtgctacaacaagtctcacaagtaacaacactggttctgcacttggtgctt

SEQ ID NO: 89540 - DNA, 252 bp, Glycine max
  Clone ID: 700905763H1
cactaataaaccagccacaaagaacaccctctctcacattctccttcctgctctttctagccctctgcaccccattggatgctgctcacaccgacttcgcaggttcagcctgcctcaaagtttcccctagccacttcgccggctcggtcaccgaagtcatcgctgccatacgtcaactcgcttcgatcctctcacgcttcggctctcccttggccaacttccgcctcagcaccgccatcgccgactgcctgg

SEQ ID NO: 89541 - DNA, 278 bp, Glycine max
  Clone ID: 700905764H1
gcacgcacgctcggaactcggatcgagagaatcccacgcgaggagaaagatggaggggaacgagcaggatgtgtcgttgggagcgaacaagttccccgagagacagccgattgggacggcggcgcagagccaagacgacggcaaggactaccaggagccggcgccggcgccgctggttgacccgacggagtttacgtcatggtcgctttacagaccagggacagcagagtttgtggccacttttctgtttctctacatgaccgtcttaaccgttatgg

SEQ ID NO: 89542 - DNA, 251 bp, Glycine max
  Clone ID: 700905766H1
gaaaacattcttgtggggtaggtactctttggaaatgtctgctgttatttacaaggactgggttttcactgatcaagcattgcctaatgatcacaccaagagaggagttgcggttaaggatccatctgctccccatggagttcggcttttgattgaggactatccttatgcttctgatgggctagagatatgggatgccatcaagtcctgggtgcatgaatatgtctcattctactacaagtcagatgcag

SEQ ID NO: 89543 - DNA, 252 bp, Glycine max
  Clone ID: 700905767H1
atacagcagagcaccaagacgcacttaaaccaattgtggaaattggcttacccggacagggagcttccttcacttaaatcagacctttggaacgaaatgggatggcaaggttctgacccttcaacagattttaggggtggaggatttatttcattagagaatctcatcttctttgcgatgaagtatcctgattcattccagcgattattgcataaacaagatggaaccacagctgagtgggaatacccactt

SEQ ID NO: 89544 - DNA, 234 bp, Glycine max
  Clone ID: 700905768H1
ttcgacggcgacggcatgctccacgcgcttcgcatctaccatggcaacaaacccaccgctctgcagccgctacgttaaaacctacaaatacaccatggaaaacgacgccggtttccctctcatccccaacgtgttctccggcttcaactccatcgtggcctccgcggcacgtggctccctgtccgctgcacgtttcttaacggggcacttcaaccccgctacggcattggcctg

SEQ ID NO: 89545 - DNA, 246 bp, Glycine max
  Clone ID: 700905769H1
gccgcttgtaagctctttcgtcgagtgcgcgatcatgacaggactcgaggaagaagccccggctaactccgtgccagcagccgcggtaacacggggggggcaagtgttcttcggaatgactgggcgtaaagggcacgtaggcggtgaatcgggttgaaagtgaaagtcgccacaaactggtggaatgctgtcgaaaccaattcacttgagtgagacagaggagagtggaatttcgtgtgtaggggt

SEQ ID NO: 89546 - DNA, 250 bp, Glycine max
  Clone ID: 700905771H1
ggagcttatctttggccaggattatgtcacaactggagcaagtagtgatctccacactgctactgagcttgcccaatacatggtatcaaattgtgggatgagtgatgcaatcgggccagttaatataaaagagcgaccaagttctgaaatgcagtcacgtattgatgcagaggttgtgaaactccttagagaagcatatgatcgcgtgaaagcccttttgaaaaagcatgagaaggcattacatgtgctg

SEQ ID NO: 89547 - DNA, 255 bp, Glycine max
  Clone ID: 700905774H1
atgctgagacaaactgaaccggatcctgtagttgaggatgactaccagtgatgaagaaattgatgtggatgaactcgagaagaggatgtggagggacaaaatgcgtctcaagcgattgaaagaacaaaccaagtccaaggaagggactgatgcagcaaagcaaaggcaatcccaagagcaggcaaggaggaaaaagatgtcaagagcccaagatggaatactgaagtacatgctgaagatgatggaggtttgcaa

SEQ ID NO: 89548 - DNA, 252 bp, Glycine max
  Clone ID: 700905775H1
gtgttactgctcactccatctcagtctcatcactctccaaccacaatcggctgtattggcgcagcgccgcctccgctcgcatcattccctccgtgtcactctccacctcttgtcgctccttcttctccttatcatcctcttccaaactcaaatgcttgcgctcctctcctcgcatttcgcacctctttctcaatcagcaaagagcggaggctcgcgtttcgagtggaggacacggaacggtatcggcgccga

SEQ ID NO: 89549 - DNA, 251 bp, Glycine max
  Clone ID: 700905776H1
gcacaacacaggaaaccaactaaattctgagaagaagaaaaacattcattcttttccattacaaaaaaatggaacgctctacaaaactcttctcggcggcgttggttctcttcgcggaactggtggcacaccaggcagcagcctcacaggatctaaaaggacagaagctaatcaacaaggtatgcacaatcgccccaagcagagacctctgcgttcaaatcctctcatcggacccaataagaagccctaac

SEQ ID NO: 89550 - DNA, 249 bp, Glycine max
  Clone ID: 700905777H1
gcgcagaaagatcttcagtgcacaagaatcagagacaggagaaaccctcttcggcttgacacgagcctcgaagtggatccttcgcgacacgaaaatgaccctagcacccatgttgctgctggagaaccacccaattcacctgaaccctgcgcactacatcagtgagattattagagaaggcacaaaaaatggcactgctttctttaagtgccatggacatgagcaatttgagatgacgggtttggatcc

SEQ ID NO: 89551 - DNA, 249 bp, Glycine max
  Clone ID: 700905779H1
accatcttgtccatctatcccacaactaatttttgattttacttgtttatttatcttcttcctcccttgtttgtttgtttctttgtttctttggcttgacaagaagaagatgatgatgatggacaagggggtgttggatgatgtgataagaaggcttctggaagggaaaggagggaaacaggtgcagctctctgagtccgagatccgtcaactctgcgtcaacgccagacaaatcttcctctctcagcc

SEQ ID NO: 89552 - DNA, 249 bp, Glycine max
  Clone ID: 700905782H1
attagctgaaccctcacctcaatcttgcgtgctagctagctttattccaattcctacagaaccaaattattctgctagctagctagtacgtcaaataaaatacaataatcaaatatggcattcagcgggacccaacagaaatgcaaggcttgcgacaaaactgttcactttgtcgaaggttcatctgccgatggagctgcttatcacaagaactgcttcagatgcagccactgcaatggccttcttgcg

SEQ ID NO: 89553 - DNA, 257 bp, Glycine max
  Clone ID: 700905783H1
ccaggctccaggttgcgttccgagcttgccaacgcaaacgtatcgagccagcctcacaagctacggatcttcaccgcgctccacccttcttccctatcccttcgtcccctccaattggaatgtgtttgtgacttcatatgctggtagttgacattttgaaattgcaactgtggtgggagcaataatatattttgacatcatcacggagatacagacttgtggcaggccgattgactccttgctagagaaagtgcttt

SEQ ID NO: 89554 - DNA, 251 bp, Glycine max
  Clone ID: 700905784H1
aatatactgatcataaatcacatagctagttgtttaaagtgagagaaaaagaaagaagaaaatggcaaactttccagttgttgacatggggaaacttaacaccgaagagagagcagcagccatggagattataaaagatgcctgtgagaactggggtttctttgagttggtgaaccatgggatatccattgagttgatggacactgtggagaggctcacaaaagagcactacaagaagactatggagcaaa

SEQ ID NO: 89555 - DNA, 249 bp, Glycine max
  Clone ID: 700905785H1
tccgtggttcgattcaatagtttagtacaaatgttgtgttctctgctgaacccttcgttcaccaccacccctctccctcgcttcaattccaatccgtaataaccgccgcgcgtgcaccgtagtatcatgcacgtcctcacacctcaccacctccaaccactacgatgtttgttcgccgccgaacatcaaggacgtggcccgctgccgccccgcggcggagaacgacttcacggcgaagtacgtcccttc

SEQ ID NO: 89556 - DNA, 249 bp, Glycine max
  Clone ID: 700905787H1
gcgatccaaagtaggtgtacatactgcatctcctggcatggttcttacagatctgcttttaagtggctcaacggtccaaaacaggcagatgtttaacatcatctgtgagcttcccgaaactgttgctagaacactagttccacggatgcgggttgttaagggaacaggcaaagctatcaattacttgacccctcccagaatcttacttgctttgatcactgcttggttacggcaaggtcgctggtttga

SEQ ID NO: 89557 - DNA, 245 bp, Glycine max
  Clone ID: 700905788H1
ggcgacgagtcttccaattcccgctggggttcatctagggtttctgacgagcccacgagaaacggttttggggctagggattccaatcgcgagcttcccccttcgcgcgctgacgaaactgataattgcaccgccgcgaagaaaccctccggggggtttgaaaggacggagagggacaaaggagggttttttgactcgcagtcgcgcgctgatgaatctgacagctgggtttcgaataagagttt

SEQ ID NO: 89558 - DNA, 246 bp, Glycine max
  Clone ID: 700905789H1
cgggcccgtgcccatgcacaggcccaaattttggctaccggaactcgaatttgggttttccaccaaaccagaaccctgttcgtgtttctcctcctgtttctgttccggttcaggttcagtcatctgaacaggacaagaagatcatggaccacaggcttcttgaattggacaagcagcttctggaagataacgacgaagaaggagaagcagatgctgcgtctgtgataaccacgagcgagtggtccg

SEQ ID NO: 89559 - DNA, 249 bp, Glycine max
  Clone ID: 700905790H1
cggcgatcatatttctctgcaatccgaacagacccacccttctctgcaattagttgctgagttttaggtgagagaaaagtgttcggaatttcccaaggtttctgtgaatatggcgaataacttagcggtgcaacaactggttggttcagagatacatggattccacacaccgcacgcctctaacgccgggagcattatggaggaagcaagaaccagatggctccgtcccaatgagattcatgccatgct

SEQ ID NO: 89560 - DNA, 250 bp, Glycine max
  Clone ID: 700905792H1
aacgattcaagatatttcaacaggacaacctgggacgccgtttgattacggtgccggacacgtcgatcccgtggccgctcttgatcctggtctcgtctacgatgccaacgtggacgattaccttagggtttttgtgcgcactaaactacctcgtcatttcaaatcaagcttgctgcgacgagggactatacgtgtgacccgaagaaggactacagagtggaggacttcaactacccttcttttgcggtta

SEQ ID NO: 89561 - DNA, 247 bp, Glycine max
  Clone ID: 700905794H1
caagaaatagagagagaacttcaagtgagggtgagagtgacacaaatctagagagagcactagtactctaaaagtctattatattcttcaaaatatgaccatgcatcgcgagtattgggcttttgtcttcggcgttatgggcaacatcatctcctttggagtgttccttgctccattgccaaccttttaccaaatctacaagaagaaatccactgaaggtttccagtcacttccttatgttgttgca

SEQ ID NO: 89562 - DNA, 248 bp, Glycine max
  Clone ID: 700905795H1
atctcactcccactcccaatcccaataacagtaaccgtttttggttcttcactccctcactctgttccaccacgctcatggccactgctcacaaggtcctggttcccatcgccgacggcaccgagcccatggaggctgtcatcaccatcgacgtcctccgacgctccggcgccgacgtcaccgtcgcctccgcgtccgacaacctcgccgtccaagctctccatggcgtcaagatcatcgccgacgcc

SEQ ID NO: 89563 - DNA, 221 bp, Glycine max
  Clone ID: 700905796H1
aaaaaaagtatcggatatctcaaaggtttatgcttcagtgaagagaaatggcagctgaggcaaatctttgatagcaaaagcagcaggtggtctttgcaggggatgacagctctcgttacaggtggttccaaaggaatcggatatgctatcgtggaggagttggcacaacttggagccactgtacacacttgcgctcgcaacgaagctgaactcaataaatc

SEQ ID NO: 89564 - DNA, 262 bp, Glycine max
  Clone ID: 700905802H1
caaaaagtcagtgcagcgaaaacggacgatccgaagaatacccttttcatctctctctacaataatcatcctcttcctcttcagtaaattattgtacctgacgatcttctcggtttgatcttatatcaatggaaatttttagacagaactcggattcacagggaaatctaattgcataggaacagtaaagacaacacctttttatctctacacaagtgattatggcggttgctgagaatgttggggccaaaatcggttcttc

SEQ ID NO: 89565 - DNA, 263 bp, Glycine max
  Clone ID: 700905803H1
gcgaaaccgaaaaccaaatccgaagagtgaaggttcgttgaatcccatggcgagagtgaagcacacgccagcttctcgcaaatccgctaaaaagcaagcgccacgcgcatccacttccacgcagccgccaccacatcccaatcgcctgcaactagagagaggaggagagctcaacaagtggagccgcagcaggagcctgaggctcagggaaggaagaagaggcgcaataggtcgggaactgtggcgcttcgtgagattcggca

SEQ ID NO: 89566 - DNA, 261 bp, Glycine max
  Clone ID: 700905804H1
acttcgatcatacacttagttgcttccaattaagatggttctgctagagaagctctgggatgatgttgtggctggccctcaacctgagcgtggccttggcaagctcagaaaactcaccaccctcaaaactattgtgaaggagaaagtagcaagctgcagaagacgttgtcgatgccgtcgacaccaacaaccccgatgactccgacgactccaacgacaccgggatcggcccgtaaagctgacaacgtttggaggagcgtc

SEQ ID NO: 89567 - DNA, 261 bp, Glycine max
  Clone ID: 700905806H1
attcgaacaatagtaaacattttctgcaagcaaaccaaagttaagcaaagcaacttttcccagaaagtttcaacgtgaagagcgcagatgattatgatttaccatgaatgaaaaagtcaatataaggaagcgaaatggaagaagagtaaaaagtcatatcagaagtttcagtgacaaaggttgttgaggaggcggatcataagaatgaaagcattaaggagacaaatggagacctgccaagtgaagtaaagatagaagagg

SEQ ID NO: 89568 - DNA, 259 bp, Glycine max
  Clone ID: 700905807H1
ggatttttctacagctaatatgataggaggaaaaggtttaaagggaaattcctggcctgatttggacatgctaccatttggatggctaactgatccaggatcaaatgaaggtccacacaggtttagtaaactcctctagaagaaaaaaggacacagatgactttgtggtctttggcgaagtctccccttatgtatgggggggatgtgaggaagattgatgcaaccacatatgaacttatcacaaatcctaccctgctag

SEQ ID NO: 89569 - DNA, 253 bp, Glycine max
  Clone ID: 700905808H1
tgggtagattagcttaaaaagaaagatctactgggggcgtcagacccatatgtgaaactcaaactcacagaagagaaacttccttcaaagaaaacaactgtgaaatacaagaatttgaatccggaatggaatgagaatttaatgtagtcgtcaaagatccagaatctcaagtcttggagcttacagtttatgactgggagcagattggcaagcatgacaagatgggtatgaatgtcattccactgaaagagat

SEQ ID NO: 89570 - DNA, 209 bp, Glycine max
  Clone ID: 700905810H1
gacagatgagagagaaagagagggagtaagtgggtaaacgacagagtactaaagagacacacctaacacaacacaaatccttgaaacgacgacggatatggccgtttcgagctcgcacatgcgtttcacctctggtgccgctccgatcccgatttctcgccccccccgccgtccttcgacatactccgccgccgaaacttccgctcatc

SEQ ID NO: 89571 - DNA, 257 bp, Glycine max
  Clone ID: 700905811H1
gtcttgatgttatcaatcaaacctggagtcccatgtttgatcttgtcaatgtgtttgaggtgtttctaccacaacttcttctgtatcccaatccatcagaccccttgaacggtgaagctgcagctttaatgatcgtgatcgagccacttatgaacaaagggttaaagagtactgtgagaagtatgctaaacctgaagacataggagctgccacagaagagaactccagtgatgaagagctaagtgaagatgaatatg

SEQ ID NO: 89572 - DNA, 258 bp, Glycine max
  Clone ID: 700905812H1
catttctggaacatccatgtcatgccctcatgtaagtggcttagccgcaattctcaaaggagcacaccctcagtggagccctgccgccatcaggtccgcactcatgacaacagcgtacacgagttataaaaacgtgaaacgattcaagatatttcaacaggacaacctgggacgccgtttgattacggtgccggacacgtcgatcccgtggccgctcttgatcctggtctcgtctacgatgccaacgtggacgattac

SEQ ID NO: 89573 - DNA, 261 bp, Glycine max
  Clone ID: 700905813H1
ctaatcttcatattcatcaaactcatcaaaatgaatctgtaccactcctccaccaccaccaccaccaccaccatcttcaccgtcatattcctcctccttgcaatattattcactctcacaccccacaaggccaacgtgccacgtgtcaccctgaggaagaagcgggcctgttgggcttcaaatccggtatccgatccgacccgtccggcctgctcagtaactggatatcgggtacggactgctgcacatggaccggagtag

SEQ ID NO: 89574 - DNA, 263 bp, Glycine max
  Clone ID: 700905814H1
tggcagaaatcctttctatgttgcttaagaagttacctacttatagcaagagaatctagctctattggttgtgtaaggtaaaaaaaaaaaacgcataaccatgtcaaccaaattgattgacacaagccttagcctttggtatggcttgtaattgcaacatcagcaatagcacaatctgataaccccccagttcttgacacagaaggccaccctcttgagcctggcagagattactacatcacaccagcggtaacagacattgg

SEQ ID NO: 89575 - DNA, 261 bp, Glycine max
  Clone ID: 700905815H1
tgcttaagcagataaaggaaatgtgaacgtgcaggaaggagccaatgatgaagtaaatgaaagacgaagaattaaaacaccagctgatacacttcccctttaccttcacataaatttctctgtgccattttattagatacaaattgatactattctgtatcaaatttcagtcagatattggctgtgtacatagggttatattattgatgcactgtatttgtattcaaattccaattccaaatggcgaacatatttgattgc

SEQ ID NO: 89576 - DNA, 261 bp, Glycine max
  Clone ID: 700905816H1
gttgtctctgtcaatgatcaggagcatgaaaaggttccttctgattctagccagaagcattgtgatgtcgataagggtgttgtttcatcatctattagtgaaggtagcatggaaatcaagttgacaacttccacatatcaatccatctcacacctatcaataattctgtttcacaagttgtttcggaaaataatagtttgacatcacatgagataatagacattccaccttctagcaaagttgtttccactcatgaagtta

SEQ ID NO: 89577 - DNA, 237 bp, Glycine max
  Clone ID: 700905817H1
gtgttgctgttctattaaacttttgtactcttgctttgaaactagttggttatgcaagttttagttttctattttatttcagacttttcaggtgctcatattcttatgatatcatcaaactgcaaatatagtgagcccattaagctattactgaaatttgttgcagatttgaaattcttctaagatggatacttcttataggactggtggagtcaagtacgcgtgcttgctttttga

SEQ ID NO: 89578 - DNA, 259 bp, Glycine max
  Clone ID: 700905818H1
atttgaactactttagtattatgttagcattttcatatgttaacacatcatttttaatcttgtatagttatacctattatttgccagttatatggataggtaagtaaggtgctgctaacataggggatttgtagtacaaaaatttacggatgtttcgaggtggaagagtgatgttggtgatggaaatggtaatttgtatactaagtggaccaccaaattgcaaacaccacaaggatactttttattataaagcacatct

SEQ ID NO: 89579 - DNA, 258 bp, Glycine max
  Clone ID: 700905819H1
gaagaagataagctagctaaggcagcaatgggtaatccttctaagcttttcccatttttctttgcattcattgtgtttctgatgcccttagtttccttatcccacaatgacttctctacctttgccataaaaccgtttcatacctagtttcctttagtgaaaatccaaaccataatggccacatcaccacaagctccaatgaaagagacaaatcacgtctttggaggaaagccttcattggcttaaaaaatactcacg

SEQ ID NO: 89580 - DNA, 259 bp, Glycine max
  Clone ID: 700905821H1
atccttttgctgagcacatagcctactttgtgttatttgccattccattatacacaactgtggttgccagaacagcttctatagcatcatatgctggttatctcgcatacattgacttcatgaacaatttggtcactgcaatttcgagtgcatcccaaaggccattttcacagcatttcccttcctaaaatatctcatgtatacaccatcgttccattcactgcatcatacccagtttcggacaaattactcactcttc

SEQ ID NO: 89581 - DNA, 259 bp, Glycine max
  Clone ID: 700905822H1
gataattagaggggttttctctttgagagaatcgtatcttacaacttttcgtgaccacttttagtgagggaagagaagctaagagagagactccaattagattcaagagagatggccatcagccatgaaactgggctttcattttcggtcttctaggcaacgtgatctcctttatggtgttccttgctccattaccaactttttaccaaatctacaagaaaaaatcatccgaagggtttcaatcactaccttatgttgt

SEQ ID NO: 89582 - DNA, 257 bp, Glycine max
  Clone ID: 700905823H1
ataagtatgatgttcaaattgatattgaggttcttgatttgcttgacactgcttcaagacaaaaagagatccacattgttacaaaaatatactggggggatgcaagagagaaacttttggatgctattgaagtttgaagctggattcgctggttatgggaagcaggggcctcagcacaatccaaaggattatattgggaagtgtaagcaactttgtgatgacccatgcctcttgccctgtgactatcgtcaaggaaa

SEQ ID NO: 89583 - DNA, 259 bp, Glycine max
  Clone ID: 700905824H1
cgcaaagtagcaaacttccctggttatggctatggagaacgccgggaatttagaagcggccatagaacaattgctgaatgcggagaagcaagcgaggctcgccggcgacgtcgccgccaccagaaacgccgtactgaaattttacggatgtgcttcgaagcgcgtgcctggaaaaccctcaatgaccagattgttctcttgtccaaacgccgtggccagcttaagcaggctgtgacagcaatggtccagcaggctatgc

SEQ ID NO: 89584 - DNA, 258 bp, Glycine max
  unsure (1)..(258): unsure at all n locations
  Clone ID: 700905828H1
gcttccaaccctctacatttatctttgtcaatataacatttctgatgctggactttttttgtattttccatccacacatcttatttttgtggcnacaccttncacattggnggagacattgnnagttagtgtagaaactcatagacttgagactaaacaatgagtctcattcactggtctttaatcttatggatcaccatgatgatgcttattatccataatttggataacgtggaaggaagataccactatcacagg

SEQ ID NO: 89585 - DNA, 258 bp, Glycine max
  unsure (1)..(258): unsure at all n locations
  Clone ID: 700905829H1
cgtcaccacaaaacctaagattttcaatagatcttaacttggtaaccactttctcacggcaacggctgtttacactnngaaccgtcgccgtcaaccgtctgccactgccagagttcatttggacaaaagacatgggggagtagaggattctataaaccttgggagctgtcatctatacagggattatagtgcnacttgcattattcatttacttagataacaagacacataggatggaacccagtagagagcaaagaa

SEQ ID NO: 89586 - DNA, 256 bp, Glycine max
  Clone ID: 700905830H1
gccacttagaggttgaagcagcgcgcggcttcttagtgagattcaatggcgttcattggtgcagtcaaattcttgctgcagcacttacttctattatgcctcttcaactatctacctttttctcaaggtaagagaactggaatgaagggtacccgtttataagaagagcaagttcattgggttataatgggaaaagtggtgggtatgattatataatagtggggggtggaacagcagggtgtccattggctgcaac

SEQ ID NO: 89587 - DNA, 260 bp, Glycine max
  Clone ID: 700905831H1
ttttgatagagaaacttacaaaacattacttcaagctggagaatcaccaccatgccatcacacaccttcaaccagaggagttatcatcctcactgcttgcatttaaatcccatatgtccaaatcaattgaccactagcatcggatttgaaacccggatcagagacccccctgtccttaacatggtttggaaagtgtttcggcctcttgcccttcatcaacaaggcttttggaaagcttgttgtggatattgactacccaa

SEQ ID NO: 89588 - DNA, 258 bp, Glycine max
  Clone ID: 700905832H1
tgcaggggtatgcttcgttccaccattctcatagaacccagcctactccgttctttaaatttcaattctaacaaacatcacatagcttcactcaaccaatggtcttgccggtttcattctccaaaacccccttatcttcctctcagaacgaaacgccgttgtctcaggaccctgtcttgaaggccatttcagagatttccaaaggcgaagggagggttggccaaacaacaaacgtaattattggaagcactgctgcga

SEQ ID NO: 89589 - DNA, 112 bp, Glycine max
  Clone ID: 700905833H1
accttcctccagtatatcactggcagtccctcgtgagtgcggcatgcaccttttcgtttgtttcggagccgttttggcggggcgtactaaacccactacgttccacacaaca

SEQ ID NO: 89590 - DNA, 259 bp, Glycine max
  Clone ID: 700905834H1
atttctcttccctcaactaaactcatcttccaaaacgcagagccaacccatgtcgttccccttcaaccactctcccgccacccacacccaccaccgcatggacgacgacgacgacgaacgacccaccgtttccctccgccgggaaactccttcagcaacccgccacctccgttctacggcgtccctcaaccaccacccccacagccggagatccacgtgttccattccgctcacgtgacaccaggacacgtgtcccatg

SEQ ID NO: 89591 - DNA, 257 bp, Glycine max
  Clone ID: 700905835H1
ccgcacgaaaccttgcagtaacaaaaaatgcggagtttcactttctttgaacgagtttctagagctttccgcgatcatgggtccaacttcaagcttgtactcctctgcaccaccgtaagtggtggagggatgtagcttacggagaggctgctgccgcatctgaagcagcggcggcggcgacggagaagaaaaaggtggtggtgctgggaactgggtgggctggcacgagtttcttgaggaacctggacaaccccaaa

SEQ ID NO: 89592 - DNA, 257 bp, Glycine max
  Clone ID: 700905836H1
cacagcttttgttctagcacttcgctgtctgaggttctggattctcagtgtttgcggacgcagcatcatcttttagggaagaatggatcatcaagggcatagccagaacccatctatgggggttgttggagtggagctcaattagcatatggttctaacccatatcagccaggccaaataactgggccaccggggtactgttgtgacatcagttgggaccattcaatccaccggtcaacctgctggagctcagcttg

SEQ ID NO: 89593 - DNA, 258 bp, Glycine max
  Clone ID: 700905837H1
atctacatcaagcatcatgttcgttgctcttagataatgttgtatgattatagacgactgcatcgtgtctgcctgctcagatgcgtacttgaccgattcctgtctcttgtaacaccaggtcccacggacagagacgatggataaaacgttgttggcctgtctcggttgtatgtattagctggtgcaccgttcgagagcacgaccttacccatagctgctgagagtacacgatgacaagacgctctagatggcttcaat

SEQ ID NO: 89594 - DNA, 259 bp, Glycine max
  Clone ID: 700905838H1
acgccgcactctcttttcttccacacaacatacgagttttcgaaaagtgcagatgcggcgatcgtggcggcgaccgtggacgttttcggaagtggattcggcgggtgacgaagcggaggttaaaggcggcgaagccggcgccgaggcccccgccgcgaggaatcaggataagtgggtcccgttgaccaaactgggccgcctggtgaaggagggaagaatccgaagccttgaacagatctacctccactcgctcccgatc

SEQ ID NO: 89595 - DNA, 257 bp, Glycine max
  Clone ID: 700905839H1
ggcaaacgtaagatgatgtctgttactgttgctgccgacactacctccgccgccgtaggatcctgtctttcacgatcgcggcggcggtgcttaacggtggctctccgatctaaagtgtcagtcaccccaacagaatattgacgaaactcaaacacgagtgtgccactcctctgccccttcttcaccaagtggccaataacatgtcttctgacatgcgagctgggcttgctgcagaggctgggcctgggcccgggctt

SEQ ID NO: 89596 - DNA, 253 bp, Glycine max
  Clone ID: 700905840H1
tggatgtgctcctaatcgtgctacatggaacaccatgcttgctgtatgtagcgaggagggtaagcacaattatgttaacaaggtcttgagggaaatgaaaaactgtggatttgagcctgataaagacacatcaatacattgattagtgcatatgctcggtgcggatctgaagttgattctgcaaaaatgtatggggaaatggttaaatcaggctttactccatgtgtaacaacttataatgctcttctaaatg

SEQ ID NO: 89597 - DNA, 250 bp, Glycine max
  Clone ID: 700905841H1
tggaagagaaaaatgggagacacaaaggagagagctacgaagaaacccgcggcaaaatggcctctcatcaaacccaaaaagaatcttcagattagccgcctccgagatttcgatctcttcacggggagctaggtccaacttatggcgaacattcagagataatgatcgaatgttggtggatgatcctgtccttgcagatactatttgggagtctggacttagcaaactattttctgatattaaaattcga

SEQ ID NO: 89598 - DNA, 256 bp, Glycine max
  Clone ID: 700905842H1
ttcgatttgttgtggattggatgatggaaaaaccagcaagcccctttcattgaaagggcgcagtgaactgtaattgtgaaaaggttggaagatctggccaaagaaggtgatagccctgtagattcgttccatggttcgatccttgcccagtacaacgcggcgtgttcgaattctgatcgcttttacgcgagaaagggggaccaccctctaagcctaagtattcctcaatgaccgatagcgtacaagtaccgtgagg

SEQ ID NO: 89599 - DNA, 246 bp, Glycine max
  Clone ID: 700905843H1
ctctatttgcgttttctcattttctttctttcgttctcttccgtggaacgagtagtcgaaacttgaaatcaaaaggcagcgggggaaaaagatcagagagcagtagggttcgaaaatggcagcagaatcatagagggcgaagaagataccaggttaagcggaggtaaccaattgctcatagttgacgatggcttaacggaaatgggaaagcaagccgcttggagcgtgagttcctgcaaacgcggt

SEQ ID NO: 89600 - DNA, 257 bp, Glycine max
  Clone ID: 700905844H1
caaacctgcagcttcttcagatggggatgaggatttcatgtccctaacagtaccaaatgatcaaaataagaattttttacccaatcagagaggaactccaaatgcatctatagataatgatatgggctacacttccagcaatctatgggttaattcttcttccagtagaggagcacggattcaagctaattctcgagatttggatgagcttagtccacaagaaatcctatcatctcagcatactgggaaactttctg

SEQ ID NO: 89601 - DNA, 103 bp, Glycine max
  Clone ID: 700905845H1
gactttcaaccccatccaatcctcacatgcatgctgtgtctgccaaagtgccaagtcacataacatttccattgttaccattctttctttccacacaacatac

SEQ ID NO: 89602 - DNA, 255 bp, Glycine max
  Clone ID: 700905848H1
cttcaattcaatcttcaaggtcctctcagagttccacaagttgcttaagcttgacaggaaaaatgggttcccttccattttcatgggagtctaccctggctcattttatggaagactgttcccaaacagttcttgctctttgtccactcctccttcagtcttcagcggctttcaagggttcctccatcagtctatgctgagcacaaaaggccattgaacaaagggtgtgtttacatttgtgaatcaagccctgaa

SEQ ID NO: 89603 - DNA, 248 bp, Glycine max
  unsure (1)..(248): unsure at all n locations
  Clone ID: 700905849H1
acgagatttttngtcaaaatggtagtggtaagttgagtctagggcttcgcaaagtgaagccttaccttgctatattgtcccttcaatttggctactcagggatgtatatcatcactatggtttccttcagcatggaatgtgtcattggatactctcagtgtatcgtcatgtagttgccgctattataatagtcccttttgcacttgtccttgatagaaaaattagaccaaagatgactcttcccatct

SEQ ID NO: 89604 - DNA, 256 bp, Glycine max
  Clone ID: 700905850H1
tgagtgccaaaaacacaaaattaaatgctggcttgccagaagaggagaatgagaaatctgatcaggttccaagcccctctgctccacagccatctgatcaggttactgaaaagcatgtcacccatgcaaggctgttgatactgaagctgatgcaagtggtgtgaacttatctcctaaatctaacaatatacagtcgcctaattcctctaagaattcagagccaagctcacctttttcaccaaggaagtccttgcat

SEQ ID NO: 89605 - DNA, 257 bp, Glycine max
  Clone ID: 700905851H1
gtttgttacctcactttgttttttttctctgcagtagtagacaaaaaagaaagacagaagaagaagaagaagaagaagaagaagatgttgagggttgcagctagaaggctctcttctctctcctcctccctccgtggcggcccaaccacgccgcttccgcttatgtctctcgaaacgcagtcgttgatgaccgcagatccgatccttcctcccatcccctttttcccttcagaggttttgctactgaatccctgatc

SEQ ID NO: 89606 - DNA, 254 bp, Glycine max
  Clone ID: 700905852H1
cacgaggatgataatggggaagaagagtaatgcggaaaacgatgaggtggccaggttgaggaaggtggtgagggaggtcggggagctgcttggggcgtttaacttgggggatgttattgggttcatgagcctttggatctgcaagggtttgggaagaagaacatggaaactcaccacaaggtggatgcgatgatggagaaggtgttgagggagcatgaggaggctagggctaaggaagatgctgactctgatag

SEQ ID NO: 89607 - DNA, 254 bp, Glycine max
  Clone ID: 700905853H1
aagcctttgttgcattcttctggctccatgttaccctccaaggacaaagaactttctgtttctgccagaaaactcgctgctacattgtgggaaatcaatgatttgcctccttcgagggtgaagaaggattcgaggttgatcaactgagaggcttcaaggagaaggttagaggcagacataagaagagtgtgcggttgtacagatcgggcctgttaagggcatagatgtcagatccgtcgcatagtcctgtctca

SEQ ID NO: 89608 - DNA, 254 bp, Glycine max
  Clone ID: 700905854H1
catgaactggaaggttcatctagtaacactatggctgcacgtctgcgtcggcatggcaacagaactgtatccgttatcaattctggtaatgcttggccagcagcaggtcgtggactggtacagtcataagtaatccttcacaatctaaactttcaacaaataatgtccttggactgtctcgtaacactgggcagatgaaaacagtaattaacagtggaccgtcatcatcaacttatgctggttctattcaggct

SEQ ID NO: 89609 - DNA, 193 bp, Glycine max
  Clone ID: 700905856H1
agataggcttcacttcaacacttcaagcagccttgggctcatgagcatgagcctgttggcagtctcctagaagctgttaaggtaatcaagcctacagttttgattggatcatcaggagtgggaaaaacattacaaaggaagacattgaggctgtgacttctatcaatgaaaaacctcttgttttggccctctc

SEQ ID NO: 89610 - DNA, 254 bp, Glycine max
  Clone ID: 700905858H1
agcgagtcactgttccgtgttcccactgagtcggtatcaacgagtgaccgagtcgaaaagcgagtcaccactccccgcgctgcatggaccctctcgaagctttggtcgcccaaatccaagggctatcggctctcccggcgacctcactcgcctccacactgttctaaagcaagccgatgactcgcttcgatccgagtcaactcgcctcgctccgattctcacacagctcgacccctccattcactccctcgggt

SEQ ID NO: 89611 - DNA, 102 bp, Glycine max
  Clone ID: 700905859H1
atctaaatgtcctttttccttcgtgtccgtagtcaataatgcctcttccaactcctccacgagggagccttcggacgtgcatcgaatttcagaattccaaac

SEQ ID NO: 89612 - DNA, 255 bp, Glycine max
  Clone ID: 700905860H1
caaacaaccacaagtgttcttcctctgtacacaaactctattcctagttcagagtaccgtccttttaccttgcgtacacatcaatgaagaaaaaaaatggaaggagctgggtattgtgggagtttctttagaggtgcaagccttacatagccatggtttctctgcaattcggatttgcgggtatgaacataatcactaaggtttccctcaaccgtgggatgagccactatgtgcttgtggtttatagacacgcct

SEQ ID NO: 89613 - DNA, 253 bp, Glycine max
  Clone ID: 700905861H1
aagcagtgcaatgttgccaacaagcaccatgatcaggacccttgaattttcctccccttgtctatgatcgaggaagaaaatctgtaatatattatgcaaaaaataattaaggtcttttcctttaaatggctggttcaatgaaccgagaccactgcaggttcatggggatgggaggattaagaggctatgttttttaatcttccgatgttactgttgttttttttttaatttcaataaggatattatatatgta

SEQ ID NO: 89614 - DNA, 254 bp, Glycine max
  Clone ID: 700905862H1
tacagatgctgctagaagcgcttctgatattgtcctcactgaacctggtctgagtgtcattattagtgcagtgctcaccagcagggcgattttccagaggatgaagaactatactatctatgctgtgtaatcaccattcgtattgtgtttggtttcttgtttattgcgttgatctggaagtttgattttgcacccttcatggttttgattattgccatactcaatgatggtaccattatgactatatccaagga

SEQ ID NO: 89615 - DNA, 251 bp, Glycine max
  Clone ID: 700905863H1
catgaactgggacaactcaattgcttgtctcagccactgttccaggtctgattatggctctctggcctcactgaataggagcttttggaacacaatccgaagtggtgagctgtacaggtggtgaagactaatggcataatagaacactggatttatttttcctgtgccctccttgaatgggaggcctatgatccaattcgtgaacggtggatgcatttaccaaggatggcttctaatgaatgcttcatgtg

SEQ ID NO: 89616 - DNA, 255 bp, Glycine max
  Clone ID: 700905864H1
ctccaaggaagtcccctaatcagaaccagagatggacaccaaacccaccgagatcagcagcggcaagatgttcggaggttacaacaagagattcaagcatttcagccttaccctgggatgctccatgaattccacatctacttccctccatctccttctccctctcacaaattccctgtgctgtactttctctctggcctcacttgcaccgacgagaacttcatattcaagtcgggtgctcagcgtgccgcttcc

SEQ ID NO: 89617 - DNA, 253 bp, Glycine max
  Clone ID: 700905865H1
ctttgtcaatgggtgtgatgcgtccatattgttagaccagggtggtaacatcacacaaagtgagaaaaatgcagttcctaacttcaattccgttcggggctttgatattgttgatgacatcaagagtccctcgaaagctcttgccctggagtcgtatcttgtgctgatattcttgcacttgcagcagaatcttctgtgtccttgtcaggaggtccttcatggaacgtactactcggaagaagggatggtctaa

SEQ ID NO: 89618 - DNA, 250 bp, Glycine max
  Clone ID: 700905867H1
caccaaagaaagaggtgaagtcaaatggtccttagttctgggagtgttgatgcttgagtcttgacggaacgaacggaaaaggggatctcaatggacaacaccaagccccttatcgaactggaactcacgatgatggcagaatcagaagaaccgggaatgtgtggactgctagcatacacattataacagtggttgtaggggcaggggtgctgtctttggcatgggttatggcacaactaggatggttagc

SEQ ID NO: 89619 - DNA, 251 bp, Glycine max
  Clone ID: 700905868H1
cagaaagcaagctcatcctagagttttaaaaatggcagcagcctcctccatggctctctcttccccatccttggctggcaaggccgtgaagctgggcccatcagcccccgaagtcgggagggtcagctgaggaagaccgtcaccaagcaggcctcctccggaagcccatggtacggcccagaccgcgtcaagtacttgggcccattctctggcgagcccccgtcctacctcactggcgagttcccaggtga

SEQ ID NO: 89620 - DNA, 254 bp, Glycine max
  Clone ID: 700905869H1
ctcgagccgagaaaatgaaaagagtgcgtaaagtaaagtgggagcaagaggttaataaaactggagacggcgtggtaccaaaggagcctctctctcctgcctgcgctcgagggagcaattgaagagagaagaagtaataagctacgatgatgtctattacttctataattggtacgccaaggaacagggttttggggttagggtcactaatacctggtaccgcaagaccaaggaacgttacagagccaaactta

SEQ ID NO: 89621 - DNA, 252 bp, Glycine max
  Clone ID: 700905870H1
gtctcaaacctcttcgttccttcgattcattccatttcttccaaaatggccaaagacccagttcgcgttctcgtcactggagccgcagggcaaattggatatgctcttgtccctatgattgctagggagtgatgctgggtcctgaccagcccgtgatcctccacatgcttgacattcctccagcagcagagtcgttgaatggggttaaaatggaattggtggatgctgcattccctcttcttaaaggtgttg

SEQ ID NO: 89622 - DNA, 253 bp, Glycine max
  Clone ID: 700905871H1
attcttccatcccaagccatttttttccacaaaagaagctccttttcatccttttctgctagtgcccaggtggagtctaatgatggttcagctacagtagccacacctggtgaatctgtgacagaggtctgaaaactaaggagtgggaggtgggaatgttccaaaacgaggttgcagctagccaaggtataagaataaggagaagaccaccatctggaccccctttgcattatgtaggaccctttcaattcag

SEQ ID NO: 89623 - DNA, 249 bp, Glycine max
  Clone ID: 700905872H1
catccctccaagctatggaaaaatgtggcagctcaactttctgtctcttgcagggaatgatttgagaggcttcataccaagtgagcttgggaatctcactaacctgactcatctttacttgggatatacaatcagtttgatggtggaatccctcctcagtttggtaagctgaccaatttggttcatctagacattgcaaactgtggcttgacaggtccaattcctattgagttgggaaacctctacaag

SEQ ID NO: 89624 - DNA, 259 bp, Glycine max
  Clone ID: 700905873H1
ggtgtgtgttggagttagagagagagagaaaaaaaaaaggttcagaagaatcagataggttagatttatatacaaaataaagaatagatacacttggagttggagttacacattattctctctctcactcacaacactcagagtgcaagctagagagagagagatggaggatctcgaggaggaagagaacggagcggaggaggtgttggggtcaagcttgaccatggagaaggtggcggcggcgaagaagttcattgag

SEQ ID NO: 89625 - DNA, 248 bp, Glycine max
  Clone ID: 700905874H1
tatgtatcctctatctctgctccattagcaataccacttgtgtatcctaggatgatggctatccatgatcttgactcaaaggaagatgatgactctgttattcctccctttcttcctctttctagtaacacatcagtgatgatggaatatatcttcttgagaatggtcatgattgtttgatatatgttggagactctgtgaatccagacatcgtgcagaaactgtttggtgttgctacagttgacaaa

SEQ ID NO: 89626 - DNA, 253 bp, Glycine max
  Clone ID: 700905875H1
cttagggcttccattaccaacaccaacaccatcaccatcaccatctatggcttgctcaagcgcccaaatacacggcctcggaaccccttccttttcccgaaccctatttttaggtcagaggctaaatccaaggccgcctttatcaaggtcaagtccgcacccactcccaggaggctccgccctctcagagtcgttaatgagaaagtcgtcggtatcgatttgggaaccaccaactccgccgtggccgccatgg

SEQ ID NO: 89627 - DNA, 69 bp, Glycine max
  unsure (1)..(69): unsure at all n locations
  Clone ID: 700905877H1
cactaacgnnnnngnggcnnnctgctaagggtacnaattgaaaaagttgaagcaaaacattcaacactg

SEQ ID NO: 89628 - DNA, 250 bp, Glycine max
  Clone ID: 700905878H1
gcaaaggagagggaccttggttacttcctcatcttcccttatatgatggtgaggatgctgcatgaccaagtttggatcacactctctcgccatcgaactgccaaaggcaaaaacagaattgttgacagggcattgagtttgaacaagttgatcgagaaagcaattgggatgaccagatcttgttcaatgggatcatattttatataggttatatgttagttccagagagttctcacatgcccttgtggag

SEQ ID NO: 89629 - DNA, 253 bp, Glycine max
  Clone ID: 700905879H1
gcacaattctctcttatcatctttgttattacctctttccaaagtccaaattttctagttccaccaaaccaaaccaaaccaaaatggcagcagcctcagcctcatccatgatatcaacaccagcctttctccaaccatccaaaagcaccatcatttgaagccatccaacgtgtgcttccaaggtcttagacccctcgcaaggttcaccaaagcctcatcaaccaaagtgagcaccaccaccaaaagggttatt

SEQ ID NO: 89630 - DNA, 251 bp, Glycine max
  Clone ID: 700905881H1
cgagaaaaaaacttggacggtgaaattggaaggttttccgggatcccaaggccgaatcttggttcaatttacgaaaagagaagagagaggaacaacaacacccgttgttgaatcttcaagctgatcaaatcatatagagagagaaagagagagacccggataggaaaatagcgtttagagagagaaaggtgaagtgaggttgtttaaagtttgggtcttggtgggtgaaagggaaagatgacggatgtggt

SEQ ID NO: 89631 - DNA, 251 bp, Glycine max
  Clone ID: 700905882H1
ggtacttgtttgtgccttattccctctgattctggaacaagttcccgttctttcttatctttctccactgttttattttctccctgatcttcctctaccttaatttcagtcctatttgttcttcgacagatactcttttaccttcaccagctcattcttcttctatcttcttctgctatatatgctcaacctttaaagggtatttctctctctctctctcaactagtttgagtttcattgtactttgatat

SEQ ID NO: 89632 - DNA, 250 bp, Glycine max
  Clone ID: 700905883H1
tttcaatattacttcttcccaaagtttcagataggatagctgctcgctacaatgatgtggaggatacactagccagggcaaatacgtggctgaatgcagctcaagcttcaggtgtccctattgtcttatgaatgtccaaaccgagtccctacttactaagatctctggagagacagcttcttccactgtaaatgcaggcccattatccgacttatctaaccttgcaaatgcaagcctttatggctctaac

SEQ ID NO: 89633 - DNA, 252 bp, Glycine max
  Clone ID: 700905884H1
agcaccaaacctcactaatccaatccaacttaaactttctcatattttccattctccttagctttttagctaattaacgttgtcgtcacaaagaataaagcatttagttcaggtaattgaacatatatataagttgttgtaaacttcatatctgactttgatccttacggattaaaagaagaaaaaaaagtgatcacagagagagaggcacgatggtgaacctggtggcagcacagaggccattgttacatg

SEQ ID NO: 89634 - DNA, 252 bp, Glycine max
  Clone ID: 700905885H1
ttccataatcccgcaaggtaaacgacggtgacgattggtgggtggcgccgtacgcctcatcccatccatcgccatcggcaccttccttaaacgacatcgcgtccatcaccccttttctcttcctccagtcacagcagtggtagcttcccaaaaaagagtgccaatggcatcttcttcagactcatgggtgaaggaatataatgaagcactgaaacttgctgatgatatcagtggcatgatttctgagcagag

SEQ ID NO: 89635 - DNA, 157 bp, Glycine max
  Clone ID: 700905886H1
ctagcaaggtcttataccttagtcacatgctcaatcatcttgtaatgaccgtgacgattgttttatttcttagatttctcatccaacaatctttatttcttctatccacagcatattcattataataataaaaggtttgagtctgtttgagtgtctc

SEQ ID NO: 89636 - DNA, 250 bp, Glycine max
  Clone ID: 700905887H1
gtgaccaagtactttgtcagcagtggctttgcattcatccatgcaaactctgtggctgatataatagctgttgaggccgtgccggtagaccgaattgatgtgaatctagtccagaagggtctccagagttcactcagaaactgaactcagccacaactgatttggagaaagctgaagctcagattggggttgatgtccatagcgctctcaactctgctctttcaggctaataataagtactgtagtgttg

SEQ ID NO: 89637 - DNA, 252 bp, Glycine max
  Clone ID: 700905888H1
ctaagacaaaagaaaaaatgtttgcagggaaaggggctgtttggttctccagagcggtggcgttggcagcaatcgcggtggtagcttgcgttgggcttacacaggcccaacccgaggccaggttcagtgcaacagcgcgaacatccccacgtgtcgcgcgctcataagctactctcacccgaacaccaccaccctcggcgacatccaaaagctcttcaacgtgaaacacatcctcgacatcgtgggagcgac

SEQ ID NO: 89638 - DNA, 249 bp, Glycine max
  Clone ID: 700905889H1
gtggagctgagatcattacatcagacgctgttgtgtcattcagggcgactgtcctggagagatcatgccgcactgtgatgagcaaatcacccaacaagcacaatcgtctgtacatggaagcaagccattggaggaaggtcttgccgaggccattgacgatggcaagattggaccaagggatgaccccaagattcgctccaagatcttgtcagaagagtctggttgggacaaggatctcgccaagaaaat

SEQ ID NO: 89639 - DNA, 177 bp, Glycine max
  unsure (1)..(177): unsure at all n locations
  Clone ID: 700905890H1
ttgggaatttttcgaaaccctaaaaagatgaacccctacgatagcagatattctgacgcctcttcttatcgcggccgacgttctgnattcgttgggcctattccgccgccgaacatcgttagcccggaagcgcggtatccttcgatgtccctggacccaacgggttccgatctgtac

SEQ ID NO: 89640 - DNA, 255 bp, Glycine max
  Clone ID: 700905891H1
ttctagggttgatattcttgtgcaaattcttgggtctgaggaatttgtggagcgtgatgcagtacataaggctcttatgtctttgctgaggcaggatgtaaaagcttctttgacggctttgtttaagcacttggcagtgttgatgagccaagcacggatgatgtcattcgtgagaaagttataaactttgttagagataaggttttccctatcaaagctgaattgttgaaaccccaggaggaaatggaaagacac

SEQ ID NO: 89641 - DNA, 252 bp, Glycine max
  Clone ID: 700905892H1
caacataacgttgctaattgcttgcacttcctcttatggttgcttcctttgtttctcattagctgttttggtatttgtcttagttctacacctttcctcattctccgcagtagcaacctgcgaaccatctctctgagaaaaaaaaaaatggcgtcgaacgggaatggcagcgttgcgaacgggaacgggaccgctaggaacggactggcgaagattcagacgcacaagaagcataacggaatttgtcacgac

SEQ ID NO: 89642 - DNA, 250 bp, Glycine max
  Clone ID: 700905893H1
gtgagccacgtttgtgtgagatgtgtagccacacccacttccccagagtccccaaattcggcacccttgccagacccaaggcaaaccaaggttctccttccgaagacgaagcctcagaaatggtcaccggggtggctcccggggagtacggtggccctcccaccaccaccaaactccgcaaatactggggcggcgatgacgaagaccctttggcctctgatgactatatgtggaacaaggagtttatggg

SEQ ID NO: 89643 - DNA, 252 bp, Glycine max
  Clone ID: 700905895H1
cgaatatctagatcaagatggttcactttcttgagaagagtattccattaccaaaacggaccaagatccaatctcggctccaaccctttcaattccagcacttggatgatgctggagttgattgcttgttggtccaaatagcaagcacaacattcactttggccatttcgaagagtgtgaagccaatttggcctatgagagtgtggatagcaggttatgatattggttgtgtccttaatcttctgctacttt

SEQ ID NO: 89644 - DNA, 252 bp, Glycine max
  Clone ID: 700905896H1
catgaaaatgggttcttctttgtggactttgtgtctaattttggcttcactagcctcttctgcattctgtgcctttccacggaggccagtggatgttccattcggcagaaactacgttcccacttggcttttgatcacatcaaatacttcaatggaggttctgagattcaacttcatcttgacaagtacactggtactggcttccagtccaaagggtcatacttgtttggtcacttcagcatgaacataaag

SEQ ID NO: 89645 - DNA, 67 bp, Glycine max
  Clone ID: 700905901H1
cacttgtgttggatgtaatcaagagatcattttatcaaataaataatgccaaatggcatgtcgaagt

SEQ ID NO: 89646 - DNA, 275 bp, Glycine max
  Clone ID: 700905902H1
cgcgtattcggctcgagactcaacaaccgaggcagaacttggcaaatcaaactatccctcagggtcaagttcagtcccaactcttgcatccccagaacatggtccaaaccaacaatattcttcagcagcagcaaccatccattcaaaaccatcaactacatagaagcctctctcagaacccatcacagcagcagacaactattggtcagaatcaaccgcaaaatttgatccagtcccctatgcctgatcatgttcaacaattacagatgtctgac

SEQ ID NO: 89647 - DNA, 251 bp, Glycine max
  Clone ID: 700905904H1
agctgagaagcctcaaaacacagtttacattggcaagattgcaccaactgtggaaaatgagttcatgctctctctccttcaattatgtggaactatcaagacctggatacgtcctcaggatttatcaactggaactcctacaagttttgggttttatgagtttgagtctgcagaaggggttctccgggccttgcgtctccttactaaactgaatattgatgggcaagaactgaaggtcaacgtaatcaagc

SEQ ID NO: 89648 - DNA, 253 bp, Glycine max
  Clone ID: 700905905H1
gttgctttcacttcttcctctctgcttcttcttcttccttgccctctctcgctattgagcttttctttttaacacggaatatgagtgacacaaaagggttttgaggctttctatcactctaaagctcttagctcattcacctcttgggtggtgtggtctattatgtaaattaccatttgtgcaattttttctcagatctatccaacttctcttttttatcctttattctgtttgcaaatcgccacatcaccat

SEQ ID NO: 89649 - DNA, 250 bp, Glycine max
  Clone ID: 700905906H1
cagcgactccgcgtggttttggcgaaaacttctagaacattcttccatggaggttatcagggttctagcggcggcgatcgtggtagcggtgcttgcggcggctcttccggcggacgcgtcgacgacaaccgagtattcgcgccgtgcacggacacgcgagtgcagagatccgacggattcacgttcggaatcgcgttcgctccgaaggacaagttcttctacaacaacaacaacagcgttcgttgtcgcc

SEQ ID NO: 89650 - DNA, 251 bp, Glycine max
  Clone ID: 700905908H1
gctaattactagtcgttgaatccatggctcccccagcagcaaagctaagagagattggtttggaaggctttgctctatggtgcagaggcagaagggccagtagcaataatggggtatttcctgcatcacaaggacgttgggtggttcaagtgcccaatgatgagatggaagagcttgccttgaatagcaaccaggtagctgctcgctttggtgggataatgcttctcaattgcttcaaaggacacaacata

SEQ ID NO: 89651 - DNA, 260 bp, Glycine max
  Clone ID: 700905910H1
atcttgtcaatgaagggatattttagtgtcaagcctcaagtagcacaagtcaaggattctctcatgtgctttctggctgcttgagagaaatcccaaatttccagctgagaaaacgaagtcaacatcgtggcatgcatgagactcggtttgctgtaatctttatcactttgagtttgagggtttatcaaatgacacaatacacatctgaaacgaataggagttaaagattccagcctcgacaaatctttataggaaagtaa

SEQ ID NO: 89652 - DNA, 251 bp, Glycine max
  Clone ID: 700905911H1
tgctcgtgtcctttaaattttctgtaagatatacatcgcttttattaaacatttcatttttgttgtttatccaaagttttcttcaagatgccttttcgattttcgtttttccatttcccccctttataaaaccatatagtcattgtagttcaaatactctgcttttttagttaatacactgtatttacataaattatttgtgtttagttggtcttgtcttgactactgatacttattagaaggaaatatag

SEQ ID NO: 89653 - DNA, 251 bp, Glycine max
  Clone ID: 700905912H1
cggctcgagcggctcgagcttcgttccttcgattcgttccatttcttccaaaatggccaaagacccagttagcgttctcgtgactggagctgcagggcaaattgggtatgctcttgtccctatgattgctaggggagtgatgttgggtcctgaccagcccgtgatcctccacatgcttgacattcctccggcagcagagtcattgaatggggttaaaatggaattggtggatgctgcattccctttcttaa

SEQ ID NO: 89654 - DNA, 253 bp, Glycine max
  Clone ID: 700905913H1
ccctcatctccaatctgcaaatccaactaacatgggaagccagcaagccgccgtgtcgttcctgacgaacctggcccgcgccgctttcgggctgggcgcctccgcgaccctattgagctcctccctctacaccgtcgatggcgggcagcgcgccgtcctcttcgaccgtttccggggcatcctcgacgagaccgtcggcgaggggacccacttcctcatcccgtgggtccagaaaccctacatcttcgacatc

SEQ ID NO: 89655 - DNA, 250 bp, Glycine max
  Clone ID: 700905914H1
aacacgagagccactcagtgatcgcttctcttcttcttcatcttactgtgtcaggggtgaagatggttgcatatgttcgtatttggctattgaatgaattgcactagtgttctgctgcaaattttttgacatatattggtgacgggatattttctagatggggggagcatgttctaggaagcaagagtgggataacgaagatagtcttatcagaggactaccacgaagatattgcaaatgcggagtttga

SEQ ID NO: 89656 - DNA, 250 bp, Glycine max
  Clone ID: 700905915H1
tgaagattccgcaacagagagtagaaaagatggcgcggttgatcacagtggtgtggtgcgcggtggcggtgctactgtgcgccgcggcgggcgcgtcgtgggtggaggaggcggcgaacccgatacgaatggtggcgggggtggaggcggaggtggttcgggtgatagggcagatcccggcgcgcgctgaagtttgctaggttcatgagcaggttcgggaagagttaccgaagcgaggaaggatgaggga

SEQ ID NO: 89657 - DNA, 258 bp, Glycine max
  Clone ID: 700905917H1
cggcatcagagagacagatagaaagtgcaacttcctctgttttgctcacctgtttaagccttatcataagcttagaatggcacacaaggaattttccattgccctagtgactctcattgttctctttgtcaacacgaacctccaaggtgccacggctgactatggtggtggttggcagagtgctcatgccactttctatggtgggggtgatgcttctggcacaatgggtggagcatgtgggtatggaaattgtatagc

SEQ ID NO: 89658 - DNA, 252 bp, Glycine max
  Clone ID: 700905918H1
gaaagaatagaggttgaaatgaaggtagctcccatcgtggtgttcttgttcagagatacagagggtttcgcctccaccatctcacaagcatttcgccccaagccttcctcctccttcacgcgccaagaggactcctttgagctctccttggaggcttatggaatcaaacacctcaaagcatctgggagcgtttctcacttcgttgatgatcacggcgcttacaaggtgacaattgtggctatgagcattatg

SEQ ID NO: 89659 - DNA, 250 bp, Glycine max
  Clone ID: 700905919H1
caaatggagggtccttagttctgtttctctttcttctctctgtgctttcaaccaagttctcaaatcactcttcttcttcacccttctgatctgctaattctcaaggtattcaaaattgggtggttttcgattgaactgtgatgtccaagccactgctaggcatagcggaagaggaaggtcaaagcaatgtcactttgttggtttcttcctcagccaccatggaaagtgtgtgcctgaatagtcaaaactg

SEQ ID NO: 89660 - DNA, 249 bp, Glycine max
  Clone ID: 700905920H1
aaagaaggacgatgatcatttttcaccagtggattcttacttcaccgaaaataaagatgtggtgctgagatgttctgaatctccccaagcctctttaagggaaatctctgtgaaggttcttggtcttttaggtggaggccagccaaacagctctatgataaattcagagaaggctgtgaaaactgagaatgctactgttgctgagttgcctgacttgatagacactggtgattcaaatgattaccatgg

SEQ ID NO: 89661 - DNA, 247 bp, Glycine max
  Clone ID: 700905922H1
aaaccatctccgacatgctccgaaagtgtccctcgccatgcaacttcctcgtcttcggcctcacccacgagaccctcctttggaaagccctcaaccacaacggaagaaccgtcttcatcgacgaaaaccggtactacgccgcgtatttcgaagaaaaacaccccgaaatcgatgcttacgacgtggcatacacgactaaaaggagtgagttgaaggagctgatagcttcggcgaaagaacagtagga

SEQ ID NO: 89662 - DNA, 251 bp, Glycine max
  Clone ID: 700905923H1
ttttaatctctctagggttcttttctctctcttagtttccattcaatccctgcgtcttcatcagagctgccaatggaagcggcggcgacggcaacggcgactgttctcacacccccgtcggctccgcccaggccgtcggttttcctcggaagaccctccgcactcgcattccgttccaatcttcgcttctccactaagttgagcacttcagtgtcgttctccaagcaaggtcacgcgagaccagagttgga

SEQ ID NO: 89663 - DNA, 82 bp, Glycine max
  Clone ID: 700905924H1
cccatctctgtctacctttgtatgatctcaaagttggctctcacaggaacgtgaaaaaatttcatacccgtgagattctcct

SEQ ID NO: 89664 - DNA, 251 bp, Glycine max
  Clone ID: 700905925H1
gaagcgtggaggtgcttttgtgggggtaaagagtagagagtagatctgtcacggagcgtatagtcgccggcgacggcgagggtgcactttaaccgcgattaacgatgattaaccttcgccggagcggcgaaaacatccctgcgaaatcgaagcgattcaaacgccaattggtgaagttcgaggagctgccggagtacttaaaggacagcgagttcatattggactattaccgctccgaatggccgtgaagg

SEQ ID NO: 89665 - DNA, 246 bp, Glycine max
  Clone ID: 700905926H1
caaccttgttcagtattcaatttgattaatgacaccaagatccaagcacaaagtttgtgtcttttttcatttatttttttttctgccttttgagtggaacaaagtttgagtcttttttcggaaatttatatgctctgtgacattaactgcactttcttccttgtggggtttcttctgtgcagattaaaacttgggagtgtgtgattattattccaaaatgaccccaccccacacttagtgtatgat

SEQ ID NO: 89666 - DNA, 249 bp, Glycine max
  Clone ID: 700905927H1
aattgatgttatgaaagtggaaaggtaacaattccctcatcattatattgatattgagggtaccactgctgaagatctgagttcaaaatgatttgttccttgttggctgtaaaagtgtatataacaaagtatatcagtttcagctccttgtagagagggaaaaagtttcaatgccttgacccaaaaatacttgtaacaaccacatataagacaagggaagaattgcatttttttttcttcatttttgta

SEQ ID NO: 89667 - DNA, 249 bp, Glycine max
  Clone ID: 700905928H1
tcacaaccctggctttgtagccttagtcttagcagggacggcttttgtcttagatttgaagagagccagggttgtgaatgtacgacaaaagccgctcctgctaagactaaggttacaaagccaaagcaaaaggttgaagatggtatctttggcacttctggaggatttggttttactaagcagaacgagctctttgtgggtcgtgttgctatgcttggttttgcagcatcattgttgggtgaggaataa

SEQ ID NO: 89668 - DNA, 248 bp, Glycine max
  Clone ID: 700905929H1
aaggaacatctttcgacgtatgcgagtaaccaccctgcgcagttcattcttgggtactgctccacctacatcttcatgcaaactttcatgatgcctgggacaatcttcatgtccctcttggctggggcgctttttggagttgtacgaggaatcctattggttgttttcaacgccactgcgggtgcatcttcctgtttctttttgtctaagttaattgggaggcctttggtttcttggttgtgcctgaa

SEQ ID NO: 89669 - DNA, 247 bp, Glycine max
  Clone ID: 700905930H1
atcaaaatgaatctgtaccactcctccaccaccaccaccaccaccaccatcttcaccgtcatattcctcctccttgcaatattattcactctcacaccccacaaggccaacggtgccacgtgtcaccctgaggaagaagcgggcctgttgggcttcaaatccggtatccgatccgacccgtccggcctgctcagtaactggatatcgggtacggactgctgcacatggaccggagtagaagccacta

SEQ ID NO: 89670 - DNA, 246 bp, Glycine max
  Clone ID: 700905931H1
gtaattggagagaggtgttggcgcacagaaagcagtagaaagagaggagaggagaggataggggctgggtgagttgttgtctatctcttcttctctttgtgttttggctgtggacgtaaaataatggctctgtcttttggttttgggctcttgtcttcttcttcttcttcttcttctttatgtgttctccctccatcagaaacccacactttcatgatgaggccttctgcttcttctgtttgcgca

SEQ ID NO: 89671 - DNA, 81 bp, Glycine max
  Clone ID: 700905932H1
cccgtgccggagattcctcggggatccgccggagctaaggcgtcgtcttccggtgacgttgttgatgacagtgttgacgct

SEQ ID NO: 89672 - DNA, 242 bp, Glycine max
  Clone ID: 700905933H1
cagacttacatgccttgtgactctttcatttttctccataccttttcttgttccttctgagcttaatcgtattcctcacttcggctgcttggcaatccaagccaaaagatcctgcagacgtcataagaaaatcttatgaagaaggatatgataactaatgttaccgagtatgaggcaattgcaaaggaaaaattgccaaagatggttaatgactcctatccatcaggggctgaggatcagtg

SEQ ID NO: 89673 - DNA, 249 bp, Glycine max
  Clone ID: 700905934H1
gggagaattaggtttttagggtttacaccgagcagccacacctcccgcagcagccatggttctcaaaactgaactatgccgattcagtggtgccaagatctacccaggaaagggcatcatatttgttcgtggtgattctcaggttttcctgtttgcaaactcaaaatgtaagaggtatttccacaatcgcctgaagccttcaaagctcacctggactgcaatgtacagaaagcaacacaaaaggacatt

SEQ ID NO: 89674 - DNA, 249 bp, Glycine max
  Clone ID: 700905935H1
cagcaatgggtggggagcgcaacaaggttttcactttggccgaggtctctcagcacaacaatgccaaagactgttggcttgtcattcatggcaaggtttataatgtaacaaagtttttggaagatcaccctggtggggatgaggtcctgttgtcttccacagggaaagatgcaaccaatgattttgaggatattggtcacagcaccagtgccgtagccatgatggatgagttctatgttgagacattga

SEQ ID NO: 89675 - DNA, 250 bp, Glycine max
  Clone ID: 700905936H1
cggagaattgaataccacaacagggccgtgacagcgttgtgccaaggctcagacgattagacgctgtgccatgaggttctgtcatcttcgaacagcacagactataaggagtacatcgcaaccgtggtgagaacctcgatggacagcgtgatcaaagcgttcaacatgagcgacaggctgacggtggaacacagtatacagtagcgccggaatgatgatggctctggaggattgtaaggactgttgcagt

SEQ ID NO: 89676 - DNA, 208 bp, Glycine max
  Clone ID: 700905937H1
ctcggctctggttttcttatttagacacttactcctcacactttcttcacacgctttcatctctgattcagatatgagctctcgtatattccccagccatggccgaaaaggtcaccataatgaggctcaacgtttatcctcaagtccatacatgctaccgtctagtctctaaatttctatgtacacaagctccaatcagagacaacgt

SEQ ID NO: 89677 - DNA, 258 bp, Glycine max
  Clone ID: 700905938H1
tcgattcggctcgtgtcagtactttggttgcggcagggcaaatctgcattgctatggcgccttcgaagctcttcgtcttttgcgtttctgtaaccctatttttcgccatcgttggggccgaagccgatatttccatcgaaggaagcactccactgcctgatacctccgccatcaggatccaattagatcaactcaattccaagatccaaattctcgagtctcaaatcagcgaaaagttggaagacgtgaatagaagga

SEQ ID NO: 89678 - DNA, 226 bp, Glycine max
  Clone ID: 700905940H1
tagagagtgaggtcagtgagggatcggtgttcacttgatctcatcataatcggcagcgtcaattgaagaagatgccgatcagaaacatcgccgtcggaaggccttaagaggcgtctcagccgaagacgtttaaggcggctttatctgagtacatctcgagcttcatcgtcgtgttctccggctcaagcttcggcatcgccgacaacgagctcaactgcaacggcgc

SEQ ID NO: 89679 - DNA, 249 bp, Glycine max
  Clone ID: 700905941H1
atcttatcttagctacccatcacaacaaccacgatactatttctcatactctattaggcaaaaacaccaccaaatgggagaggaaaaggagcagcctaagaatgacaccgagaaaaagcccgaggaggtagcccccaagaaagacgacggacccatccctgtcgtttacaaactcgacttgcattgcgagggatgcgtcaagaagatcaaacgcacctgtcgccacttcgaaggtgtggaaccgttaag

SEQ ID NO: 89680 - DNA, 251 bp, Glycine max
  unsure (1)..(251): unsure at all n locations
  Clone ID: 700905943H1
cgcgtctcttcactcttcaattcaatggcttccacgcacttctccattgaatgccacttccacacaacatacgatataaaaatntccgtcgtctccgncttctggaaagattttgagttggacaaggagaaatctatactggatgagcaagggcttcgaattgcagataaccaggaaagcagtcagaaaaatcgccgcaagcttgccgagaacactagagacttcaagaaggcttcgcctgaggataagtt

SEQ ID NO: 89681 - DNA, 250 bp, Glycine max
  Clone ID: 700905944H1
ctcccctcacctctctctccgaaatccccaaattgcctgtgaatgctagaaaccctaggcacgttcgatttgatgctctcccatttgcaatcaagggcgagcgcattcggttcttgcacgcaaggctggtactaccgctgcatcggcctcgatccctgaattcatcattctttctcgcaccatctttttctattccgattcgatttgttgttgttgttgttgttgttgtgtttttgtctcctccttgacg

SEQ ID NO: 89682 - DNA, 243 bp, Glycine max
  Clone ID: 700905947H1
ggagtaatggcaagagagggcacatagagggaactgcttttaagtctaaccgcacaagtgatgaggccaagttcaaggtcaagttttatgtccctccctttttgcctatcattcctgtaacaggggactactgggttttgttcattgatggtgattaccagtacgctttgattggccaaccaagcaggaattgcctttggatattaagcaggaaaccccatctggatgatgagatcacaacaa

SEQ ID NO: 89683 - DNA, 248 bp, Glycine max
  Clone ID: 700905948H1
cttcaggcagttcaagaacgaggataagccaatggggagggtgatgaaaggggtgcaatacttcatcccaatctttgagtggctccccacttacaatttctgcctcttttgctctgacttgatcgctggactaaccatctcaagccttgccatccctcaaggcattagctatgccaaacttgctgaccttccttccctcattggcctttattccatctttgtcccacctttgatctatgtgtttttgg

SEQ ID NO: 89684 - DNA, 250 bp, Glycine max
  Clone ID: 700905949H1
agcttgtttctaagaatttcgtgggtctaagaaaaagaataaacacaatgagggtgagtcaggtagtgaaatttcaagtgctgtgggagaagaaaagttaccaattttagaaattgaagaggaagaggaggaagagaatggggataataagtcaagtaacactaaacctgattgcggaatcacttgttcctatgagaagaaagtgaatagagttgagaattcaggttcttccatggttttattatgatta

SEQ ID NO: 89685 - DNA, 245 bp, Glycine max
  Clone ID: 700905951H1
ctttcttctcttccccattttttcctctttcttcctcgcctagctagctccagaaaattaggatctgcttcagatctagtgtttccctgtcccaaatcacgagtccattgagtttgattttgtggatgaaaagcatagatagggcttttgcaaaactctccaatgtttcttgaaattatatgaccatgcgtcgaattcgtatgctgcactccttctccgtcgtgttcctctactggtttacgttt

SEQ ID NO: 89686 - DNA, 243 bp, Glycine max
  Clone ID: 700905952H1
atcaaagtttcttctttctctgctctttgccttctctgacacatttggtgccttgtagagcgtgttttggcaggaaggtggtatggcgaaggacgttgaggttgctgagcgtggctccttctctgggaaggactaccaggaccctccaccagcaccactcattgatgctgaggagctcacaaagtggtccttttacagggctctcattgctgaattcattgccactttgctcttccctacatt

SEQ ID NO: 89687 - DNA, 226 bp, Glycine max
  Clone ID: 700905953H1
cttcaattagacggataatattgcacggaaacaagcatgtttgtgtgagtttttagtagctccttcccctggtctcggggattttatgttagtggctttttcgtagtgcacaacctaccaaataaaagtgctaatttgaaattgaaattttcaattaaaaattgtatgccaatgtgaagaagctaaaaggaaatacgatttgctgagatgaccataattttgaatt

SEQ ID NO: 89688 - DNA, 247 bp, Glycine max
  Clone ID: 700905954H1
attacactaataattggcctcctagtaaacaccctagtactctataaatagcatttgcatgcaccttagtcttcaccaaaatactcctcttggcatcttgtgttgtgtccctcttttaagctatttccttctcttaacacaattggttgtgccaattgccatagtcaccaaccaattaacaaaggtactatatatcatcatatcatcaccaaatgaaaaatattgggttgttttttcttgtggtggt

SEQ ID NO: 89689 - DNA, 247 bp, Glycine max
  Clone ID: 700905955H1
atttaattttctgcttttgcattctctctctcgacaccaaacaaaggtagttgtgattgcagcaaacaatgggtgtctccttcctctcgacttgcccttccctgcttccactcgttgcttatgatacaccaccctccaccagataccaacctcgttcagtgtccatttgttgtaataaaaccataagcaatgttagtgatgaagagccgttccattggagaaggagagaaattcttaatgcgctggg

SEQ ID NO: 89690 - DNA, 244 bp, Glycine max
  Clone ID: 700905957H1
gatagatttgtattgttccttcctccttcatgagtcgtctcctaaacattttacttccttcttccaccgtatcgtaggataagaccactcctaacacgttattattaccttttaattcctattttctttctattcttccacattttcttcttttccgggtgttccaattcctattctgatcaagaccctgtgagaaatattaaagacgggccactttcaaaatccaccatggaatccatttcaa

SEQ ID NO: 89691 - DNA, 246 bp, Glycine max
  Clone ID: 700905958H1
ttcctctcagattcaggttccaactcttctctctctcgccgtctaggtttttctctcaaaatttcgaaaccccgattttctctcaattcgaatctgcgattcatcgtaacctaaattattagatagttatattatctctctgcgtttctttcagcaattttctattttctcctctcatggcttcagattccaaaaaggatttccctgctgatgacaaagctggaacagaagagagtaaacatccaa

SEQ ID NO: 89692 - DNA, 247 bp, Glycine max
  Clone ID: 700905959H1
atcttctcataagctttacttaattagcaaatccaaatatggcactttcttcttcatcatcttcaacatccatatttgctttagctttgttcactcttttgcttataggaagttcttcagctcaactctctgagaacttctatgatagtaaatgtcccaaggttttctatgccgtaaaatccgttcttcaatctgctttggctaaagaacctcgccagggagcatctatcgttcgcctctctttcat

SEQ ID NO: 89693 - DNA, 248 bp, Glycine max
  Clone ID: 700905960H1
cggaatcaagatggccttgatgattgcaaggacctcttgcaatccgctatcgagagcctccaactcagcattgacatggttcacaacaacaacttgcacgccgtgtataaccaacaggctgacttcaagaactggctcagcgctgttatctcgtaccaacaggcctgcatggagggttttgacgatcgcaaagaaggtgagaagaagatcaaggagcagtttcataccgagaccttggacaatgttca

SEQ ID NO: 89694 - DNA, 247 bp, Glycine max
  Clone ID: 700905961H1
cttcttcctcctctcataccaccttcacttccatgaagccacaacatccatatcaatgacaacaacagtttccaccgatttcctccccaagttcaacccacaccccaaccgcaccaattcccattctaattcccgtacactcccaattctcaatgaaaccaccaacatcaaccgcactctctcttccgtttccaagccccaaacccataccctcgatttcaaagacacccatctcctcaatccctct

SEQ ID NO: 89695 - DNA, 246 bp, Glycine max
  Clone ID: 700905962H1
agctacaagagaagaaaaaaaaaaagagagaaaagaaaaaatttgttttataactttttaacttattgttcacttcttcttcttcttcttcttcaatatcttggttctttgatattattctattgagcaaaaaatgggagttccagagagagaccctcttgcacaattgagtttgcctcctgggtttaggttttaccccacagatgaggagcttttggttcagtacctttgccgcaagttgctggc

SEQ ID NO: 89696 - DNA, 241 bp, Glycine max
  Clone ID: 700905963H1
gagtaagtgagtgagagaaggagattctgatttgatctctcagatctgagcttaccgtcgccggaatccaactcaacctgggtcggattcttgggtatcatcgcatcgccattcgttttagcctctcaataagagattttagttcgcttcaaattcgaggtttgatttgaagttgaaagttggaatagcttaactgttgtgtaaaacaaccaacacacacgagcatgggaagccagacaac

SEQ ID NO: 89697 - DNA, 250 bp, Glycine max
  Clone ID: 700905965H1
gccgacgcctccagataaacaaccttaactttcccacaacaccacccatcattctttttctctctctagatttcatttagttgttgctgtcttcttctgtttgtgtgtgccaacacagagcgaaaaacatggctctgaaccaatcaaaagccgtgttgttgagggtgagtttggtggtggtggcgctcttcatagcagggtacatagtgggtccccctctctactggcatttcgttgaaggtttggctgc

SEQ ID NO: 89698 - DNA, 246 bp, Glycine max
  Clone ID: 700905966H1
caaaagaccactctcgacgagcttcccaaaacaagaagcaccaatggcagtcgcgaatctgcagagactgtcctcgcaagcgcaccgcctcccctccctctcgttcttctccaaatccctgatctaccgccgcacctcctcttccacgaagaaggtcgccgaccgcatcgtacggctctcggcgatcgacttcgtgggaaagaagcacgaggtggtgggcctggccggccagaccttgtgaaggcc

SEQ ID NO: 89699 - DNA, 244 bp, Glycine max
  Clone ID: 700905967H1
gttgactatgattgctcgtgttactgatggtcttcctctagctgaaggtctggatgatggtcgtgatcttaaagatgcggaattttacaaactgcaagtcaaggctttgtttaagaatctctcaagaggacattatgaagcatcaaggatgtcagttgaaactggcccttatgtttttcattatattatagaaggacgggtctgttacttgacaatgtgtgatcgtgcataccctagaaactag

SEQ ID NO: 89700 - DNA, 232 bp, Glycine max
  Clone ID: 700905969H1
agttacttactcctcacactttctctatcgttttcatctctgtttcagatctgagctctcgtatattccccagccatggccgaaaaggtcaccataatgaggctcaaggttgatcttcagtgccacaaatgctacaagaaggtcaagaagattctctgcaaattccctcaaatccgagaccaggtgtacgacgagaagaataacatcgtgaccatcgcggtggttgctgtaa

SEQ ID NO: 89701 - DNA, 244 bp, Glycine max
  Clone ID: 700905970H1
ccgaagctttgttggcggcaaggcaaatctgcattgcgatggcgcctccgaagctcttcgtctttgcgctttctgtaaccctaattttcgccatcgttggggccgaagccgatgatttccatcgaaggaagcactccagagcctgatacctccgccatcaggatccaattagatcaactcaattccaagatccaaattctcgagtctcaaatcagcgaaaagttggaagaagtgagaagaagga

SEQ ID NO: 89702 - DNA, 245 bp, Glycine max
  Clone ID: 700905971H1
gatatatatacgtggtaccctagagtgccattctgtagtttatttctgctcaccaaggcttatcacatcacaatttgtgcattgcctcgtgtcctttttcttctttgcttgccaaaaatcttacacacacaggtatctatcaaatgggttctcaccagcaagaaccatggctattggagaatgggaaaccgagggtgttgaccaaggagaataggcatggccgttctgcacacagatgtcctcca

SEQ ID NO: 89703 - DNA, 241 bp, Glycine max
  Clone ID: 700905972H1
caactgcgtcatctccggcacagtcgacttcatcttcggcacctcctccaccgtgatccagcagtccgttatcatcgtgaggaagcccctggacaaccagttcaacacagtcaccgccgacggaacatcccagaagaacatggctacaggaatcgtgatccagggttgcaacatcgtcccagaagccgaacttttccctacaaggttccaagtgaagtcataccttggaaggccaggaagc

SEQ ID NO: 89704 - DNA, 245 bp, Glycine max
  Clone ID: 700905973H1
caggtagaggcgggtttcatgagaatccatcgacctgcatatgtgaagattctgcagcagccaaagtggacaaaaattcacaatctagaaaatataggaaggataatacaacgaagaaaaatgtagcaaatgatgaaccggatgttggcaatgtgtctgagtggccagacatggatgatgatgatgatgatgatcagaatgatctagcagagaagggtacatttaatgaaacaattcggactatg

SEQ ID NO: 89705 - DNA, 245 bp, Glycine max
  Clone ID: 700905974H1
ggagctcttctccattggttcttcatctgcatgcacacacttgcatagttttggaaaccaagaatttttgaagggtagcatcaacaagaagttctggaaatggagatcaccaatgtcagcgagtatgaagctattgcaaagcagaagttgccaaagatggtgtttgactactacgcatctggtgcagaggaccagtggactctgcaggagaacagaaatgccttttccagaatttttttcggcca

SEQ ID NO: 89706 - DNA, 246 bp, Glycine max
  Clone ID: 700905975H1
cagaaatggaggctccacaaggtggatccggatccggacccgagcgagacaaatccaccgctccctcctcttgtccgatttccgtcgtctccgccttctggaaagattttgagttggagaaggagaaatctatactggatgagcaagggcttcgaattgcagagaaccaggaaagcagtcagaaaaatcgccgcaagcttgccgagaacactagagacttcaagaaggcttcgcctgaggataagt

SEQ ID NO: 89707 - DNA, 248 bp, Glycine max
  Clone ID: 700905976H1
actcaactcaatcgcctccactctctcccgcaaaccattcttcttctcttctctccctctgagcctttcatcgctcctcggagagatggctgcttccgaagaatcatcaaccactcagatggttggcaatgcttttgtgcagcagtattactccatattgcatcaagagccagaccaagtccacagattttaccaggagtctagcatcctaagtcgacctgaagaagatggtaccatgacaatggtga

SEQ ID NO: 89708 - DNA, 242 bp, Glycine max
  Clone ID: 700905977H1
gacgatccaaattatgatgccctcattgccgctttatatccagatattgagaagtactgacaagaggagcttgaatttcgtgaagaggagaagaaccgcaataagcagattcaagcttcaatagcaaaagtagttcaacggcaatctgaagcattggttaagagacgtaaagacacaccaggtgtatttgtaactagaccgcagcgtaatcagcgaaacattcattctaggagacaactcaa

SEQ ID NO: 89709 - DNA, 240 bp, Glycine max
  Clone ID: 700905979H1
ctcgagccgcttttattgaaatcctcaagcttcaatttgctttgtgctcactcatctatctattataaccaaacactcttcttcatattcttcttcttcttcttgttcttgttctatctgtgacgagcatcatggcctcgagagcagtgctattgttggctatgtgtgtgcttccggccatggttgtggccattcgcccagcaaagaaccctttttgcgtgaagggtcgcgtcactgtga

SEQ ID NO: 89710 - DNA, 244 bp, Glycine max
  Clone ID: 700905981H1
catgaagggatgatgtgacgtgttgcccgtctaccacgtggagggttttgattggatgggagagtggattccaaaagaagggcgacctcctgctttggtttcagtggattcctcgaggcggagaatgtcagggcccattttaaatactttatcaagtgccaatgtcttgggtcagtcaagtggatcatctaggcgggctgctgtttctagtagccgtgatgcatttgttggtgctagtcagata

SEQ ID NO: 89711 - DNA, 245 bp, Glycine max
  Clone ID: 700905982H1
agaccaccttccctctcttctgttaccaatggctccctcatcaaactacatttctttccttttcctcaccacccttatgtatgctcttcaaatcagtgcaagagacagccagttcttcagcaaagtcacccattttgacaaaaacagtgtcaaagagacagaacttcccaacaaagaagcaccagaagtgaacaagccagagcaacaaccacctttcattccggagactgaaaacgctatggcct

SEQ ID NO: 89712 - DNA, 243 bp, Glycine max
  Clone ID: 700905983H1
ctcagcactgccattcttcaatcacactaatggctgtcaccttctcagatcttcacaccgaagagggcatcaaatccctcgatcaattcctttctgggaaaacctatatctctggggatcaattgacaaaggatgatatcaaagtgtatgcagctgttgtggaaaagccaggagactcttttcctaatgctgctaagtggtacgatgccgtctcttctcaacttgctccaagctccctgggca

SEQ ID NO: 89713 - DNA, 242 bp, Glycine max
  Clone ID: 700905984H1
gagaaaaggaacatattagaaccagcaggtgcacttgcactagctggagctgaggcatactgcaagcatcatggggtccaggggaaagatattgtagtaataaccagtggagcaaacatgaattttgataaacttcgggttgtaactgaactcgctaacgttggccgtaaacaagaggctgtgctggcaactgttttgccagaggagccgggcagtttcaaacagttttgtgattggtgggg

SEQ ID NO: 89714 - DNA, 242 bp, Glycine max
  Clone ID: 700905986H1
atttaaagaaccttggactccccagccagaagaagaaccaacatggcacccacaatctataatttttcgtattctaaaaggttttcagagtcattcaattcttcaacatcaaaaaaggagtcatccagttccaacatccttgctttccactccatagctcaatggaatgctcattataaagccaccaaagaaactaacaagctgatggtacttgatttcacagccacatggtgggaccttgc

SEQ ID NO: 89715 - DNA, 241 bp, Glycine max
  Clone ID: 700905987H1
atttaaagaaccttggactccccagccagaagaagaaccaacatggcacccacaatctataatttttcgtattctaaaaggttttcagagtcattcaattcttcaacatcagaaaaggagtcatccagttccaacatccttgctttccactccatagctcaatggaatgctcattataaagccaccaaagatactaacaagctgatggtacttgatttcacagccacatggttggaccttg

SEQ ID NO: 89716 - DNA, 244 bp, Glycine max
  Clone ID: 700905988H1
gttcggattgcggcgacgtgagcggttcgctgcccgcgacgttgtgagaagtccactgaaccttatcatttggaggaaggagaagatggagagaaaaggaagaagaagaagaaggaaaagaaagggctgaaagagaagatcgaggagaaaatagagggtgatcatcatcatcacaaggatgaggacacaagtgtccctgttgagaaagttgaggttgttgaaacagcacatgctgaggaaaaga

SEQ ID NO: 89717 - DNA, 73 bp, Glycine max
  Clone ID: 700905989H1
atccccatcgcgtcacacagaatcgtagggtcggagtcgtgcgatacgatgcggtacgatatggctagggtat

SEQ ID NO: 89718 - DNA, 242 bp, Glycine max
  Clone ID: 700905990H1
ctccctcatcagacgctccctctccctccccttccgcaccatcgaattcacacgcaagtacccctccgtcttcgaggagttcctccccgttgcctcctctttcgcctccccccatgtccgcctcacccccgaaaccctcctcctcgactccgaggagcacctccttcacctctccgaccgcttcaaacaccatgccgccgacaggttcctcaagctcctcatgatcgccagaatcacaaaat

SEQ ID NO: 89719 - DNA, 96 bp, Glycine max
  Clone ID: 700905991H1
gatccgaggagttaccccttagctttttctctttccttattctatttcaaacttccacccgtgatggaagagagagctccagaaggaccaccattt

SEQ ID NO: 89720 - DNA, 244 bp, Glycine max
  Clone ID: 700905992H1
tctcgagccgaatcggctcgagatgatgctagctctagttttatgagacaatcagttgaaggaaacgtagacaatcgcacagacagtgatgagcttagtaatacagtagccacttctcgtgattacctagcaaagttgcttttctggtgcatgttattgggtcatcacttaagagggttggaaaatagattgcatctgagctgtgttgttggactgttgtagagaaggtgataggctgtatatt

SEQ ID NO: 89721 - DNA, 239 bp, Glycine max
  Clone ID: 700905993H1
attaactagtactcgagtgttggagggttcatttctcggataggaagtggatgtgagagtgacgaggagagccaccaagcagatttgtttcaggttgccaactattagctcactttcatagtgatagaagaaaattggtggattggaactaaacattgtttctgttggaaagacaaatacccactgatctgtctttattcgcttctgagatggaagaagagagccaaataacaaaggat

SEQ ID NO: 89722 - DNA, 239 bp, Glycine max
  Clone ID: 700905994H1
ctttgttttccgtggaaaccaacctatcttcctttgttattttcattctgataaaacaaacatattttcttccacctttttccatctttgcaaaggggataaagggttgctagttgctaccatttatggttttattccgccatttgaaggaaccttatgctcttaaaacaaataaaacccaaagggttctcttgaaaaacaccagaactttcatctaatcaaaacacgtgttgccaaaa

SEQ ID NO: 89723 - DNA, 240 bp, Glycine max
  Clone ID: 700905995H1
cctaattttatgtcaatttctattgcccaaagctctcgtaccctcactctaaaactctcgctattgtgaactttgttgctgcgtttgccactctgtcgttcccctctccgtgatggcaccttgtgtgacaaggtcttttgcttccttctcatgagaaatgcaaaatgggatctgagatttgaggggttttaatctgtttaaagatataagaagtgcaaaatgagatttgagactgagatc

SEQ ID NO: 89724 - DNA, 176 bp, Glycine max
  Clone ID: 700905996H1
cgcagagtagagcagcagagaagagagaaaacggcactgcagccgtagaaggaaaaccgaccatggtgcacgtctccttttacaggaactatggttagacgtttaagaagccccgccgtctgtacgagaaggagcgtctagacgcggactgaagctggtgggggattacgggctgc

SEQ ID NO: 89725 - DNA, 190 bp, Glycine max
  Clone ID: 700906002H1
tgccaatttcaacggcgaactccctcattcctccgctgctatctccgttcgacgctctatctgattagcggatagcgaaaatcctaagcaaaatattataccgtgttctttagcgtgacccaccttcgtaaataaaaaccctatgcaactgcactattctcgtgttcgctttaaatcaaaccgctcattc

SEQ ID NO: 89726 - DNA, 277 bp, Glycine max
  Clone ID: 700906003H1
aagagaaagaaatttgtttctctctaaagagtctccgctgaactttttggtttattgaagatgtcgttactctccgatcttatcaaccttaacctctccgacatcaccgataaggtgatcgagccgagtacatatgggttggtggatctggcatggatatgaggagcaaagcaaggactctctcgggactggttaatgacccttccaagcttcccaagtggaactatgatggttccagcactggtcaagctcctggacaagatagtgaagtgatctt

SEQ ID NO: 89727 - DNA, 274 bp, Glycine max
  Clone ID: 700906004H1
gaatgatgttggtaaaaacagggcagcagcttctgttagtaagctgcaggagctcaacaatgcagtgattgtacaaagcttgactactcagctgactaaagaacacctttccaatttccaagctgttgtttttactgatatcagtcttgagaaagcctttgagttcaatgattactgccacagtcatcagcctcctattgcctttattaaaactgaagttagaggcctttttggttctgtgttctgtgattttgggcctgagtttactgttgtt

SEQ ID NO: 89728 - DNA, 273 bp, Glycine max
  Clone ID: 700906005H1
ctctcctcctcgatcccaattccactagggattcaatttcgatgcgattccgagcttgttagatccacgacaacgtttagacaaccagattcttttgtaaaaaaaaataatcttcctttgcccaacaggtaagttggaaaaaaatggaccatgacaagactgggtgccaagctcctcctgaaggaagtatattgtgcatcaacaactgtggattttttggaagtgcagctaccatgaatatgtgttctaaatgccacaaagacatgttgctga

SEQ ID NO: 89729 - DNA, 272 bp, Glycine max
  Clone ID: 700906006H1
gtttgttttgagtatttgtttgaatcaagaaacgatgtcactgttatgccatgtggacatacgatccataagagctgcctgaatgaaatgagagaacatttccagtatgcatgccctctctgctcaaagtcagtctgtgacatgtcaaaggtttgggagaaatttgaccttgagattgctgctacacgaatgcctgagcaatatcaaaataaaatggtttggatcctgtgcaatgactgtggtaaaacttctcacgttcagttccattttgt

SEQ ID NO: 89730 - DNA, 270 bp, Glycine max
  Clone ID: 700906008H1
ccgagacacagattcttaccaaataaacaaacaaaaaaacacacacacacacactttccattttctgtggttcttcttctcacttctctcttcttctcccccctctgttactccccgcttctctgaatccctttctgttaatcatctgtctttcacctcgtgattccaaaaagattcaaactttgaaaatttttctcgaaagccaggtgttttcagaatcgagatccagtttctttttatccttttgttaagaaattattattttctttc

SEQ ID NO: 89731 - DNA, 271 bp, Glycine max
  Clone ID: 700906009H1
cacttttaccctctccacgcataacaacactgacacatttttcacctcctcctcaaaaaaacgtttcactgacacaagcacacgggcaatgtctcactatatagagccactgatgaccacttcttcatagttcagagagcctttctccataattaagaaaaacgctgtccttttgtgtccttttttcttcctctgtcctcgcacacatgggtcgccattcctgttgtttaaagcaaaaattaaggaaaggtttatggtcccccgaagaaga

SEQ ID NO: 89732 - DNA, 271 bp, Glycine max
  Clone ID: 700906011H1
gttggtaaaaaatgtacaaacacattctagagtccgaataaaaagtatgtgtgggtgtgaactctagataactattcatttgcctagttaagaagggaggaaactgtcagatattttcttatcatttcaaattcatgtttttgttatcattggatgaaaggaattgagagcctttaggatgtatgacttaggtagtgggtacaaatagggtataatgaatacgccaataactaatcagatacatcggcaccgcactgatcacgaggatctt

SEQ ID NO: 89733 - DNA, 269 bp, Glycine max
  Clone ID: 700906012H1
atgatcttaccatatcatttcaagaccttaaagtaccaaacttccaactcttctctcttctctcttcactcttcactcttgtcgtcatttcctcacaaaaccagtgtccgtaacatctccaccttaacgatgtcggtaaaggagtgtcaccaccacaagggaaagaagcacaaactctggagacgcatcttctggggcatagtgatcttcgccttcatcgtgttgctaacagttcttataatctgggcaatcctaaagccttcaaagcc

SEQ ID NO: 89734 - DNA, 263 bp, Glycine max
  Clone ID: 700905383H1
gaaaagatggcgcggttgatcacagtggtgtggtgcgcggtggcggtgctactgtgcgccgcggcgggcgcgtcgtgggtggaggaggcggcgaacccgatacgaatggtggcgggggtggaggcggaggtggttcgggtgctagggcagtgccggcgcgcgctgaagtttgctaggttcatgagcaggttcgggaagagttaccgaagcgaggaagagatgagggagaggtacgagatattctcgcaaaacctcaggttcat

SEQ ID NO: 89735 - DNA, 263 bp, Glycine max
  Clone ID: 700905385H1
cattcgaagagctcttaaccttggtgtcaatgttaagatgattactggggatcagcttgccattggaaaggaaacaggccgaaggcttggaatgggaacaaacatgtacccttcatcggcattgcttggccaagacaaggatgcttctatttcagctcttccagttgatgagttgattgagaaggctgatggatttgcaggagtatttcctgaacacaaatatgaaattgttaagaggctgcaagagaggaagcatatatgtg

SEQ ID NO: 89736 - DNA, 264 bp, Glycine max
  Clone ID: 700905386H1
gcgcaatgggaatgagtatcttatcattctcattgactcccctagggcacgttgacttctcatctgaggttactgctggactccgtattactgatggagctctagttgtggtcgattgtgtggaaggagtttgtgtccaaactgggaactgtgctaagagaagcccttggagaaaggattaggcctgttctgactgtcaataagatggacaggtgcttccttgaactccaggttgatggagaggaggcttaccagacattccag

SEQ ID NO: 89737 - DNA, 264 bp, Glycine max
  Clone ID: 700905387H1
ttgttgcgttgcactcgcggaacggagaaaaccaaagaatcaagcttcgtcaaagtgtctgtcacacacagtctttaagatctggaagcgcttctcacttgcccacaataagaattcctctcaaatttcaatttttcatttgaagataataaaaccctaaaagaggggttgcaagcaaaatgagaagctcgaagatgtggatggttttcatgtgtctgacggtgagcttcttcgctcgcattgaatcgctatccgtgacggtga

SEQ ID NO: 89738 - DNA, 256 bp, Glycine max
  Clone ID: 700905388H1
gataagatcgcgcggttgatcacagtggtgtggtgctcggtggcggtgctactgtgcgccgctgcgggcgcgtcgtgggtggaggagacgacgaatccggtacgaatggtgtcgggtgtgcaggcggaggtagatcgggttctagggcagtgccggcgcgcgctggggtttgctaggttcatgagcaggttcagggaagagttagcgaagcgacatcgagatgagggataggtactcgatattctcgcgaaacctc

SEQ ID NO: 89739 - DNA, 234 bp, Glycine max
  Clone ID: 700905389H1
gaattggtttcactaggtggtttggcaaattgcatggaaaatagaatgtgttagtttccataagcgaatgccaattatttagtttgagaactaggatgttggtggttttattatatgcttttactagtgcatgttcccgtgcatcaggagcaaaacataagagagaaaaaacaaatatgaggtacaagatttgttgaggcaactgactgataattcgaagtactccgcggagtt

SEQ ID NO: 89740 - DNA, 269 bp, Glycine max
  Clone ID: 700905390H1
aaaaaaaaataataaataagaaaattaagagccatagttagaattctgtatgatatttacgtttacggcgtgtgataaaaagatactatatagaactaaaggagattcccgtttcagttacattcaattcaacgattgaccaaaagagaattcaaaaaataacatttagatcacccaaattccaatatttctatgaaacaataattaaatctaacgagtttatttcgattgattgtatccatatggggtaataataaaagggggaggag

SEQ ID NO: 89741 - DNA, 267 bp, Glycine max
  Clone ID: 700905391H1
ctcttcttctcttgcggctagggttttagcgcagtgtcttcgagatttaaggtagatgggtaaggaaaaggttcacatcagtattgtggtcattggccatgtcgactctgggaaatccactaccactggtcatctgatttacaagcttggaggcattgacaagcgtgttattgagaggtttgagaaggaagctgctgagatgaccaagaggtctttcaagtatgcctgggtgctggacaaacttaaggctgagcgtgaaagaggaat

SEQ ID NO: 89742 - DNA, 268 bp, Glycine max
  Clone ID: 700905392H1
ctttaccataccattacaataattatcaaacctaaccagtagaaatggtgaccgtggccgaaatccgcaacgctcagcgttcccatggacccgccaccatcttggccttcggcaccgccacgccgtccaactgcgtctcccaagccgattaccctgactactacttccgccttaccaacagcgcacacatgactgatctcaaagaaaagttcaagcgcatgtgtgaaaagtccatgataaagaagcgatacatgcacctgacggagga

SEQ ID NO: 89743 - DNA, 272 bp, Glycine max
  Clone ID: 700905393H1
ctagaactagaaaagaaaaataaaatcccacaggtaagggtaataaacaaataacagaagtcagaaaaacaaaaaacagattggcagccttgtgtcccagggatgaacatgattgtggagcgagcgagtgatgctcaccacatcacgtgcttccaaaactgatctatttcccttctccttcttacttcttccttctctctgctgcaaatccaaaatctaccatagcggttccattttctgaatttctcgagcgaacttcgcccagttctagg

SEQ ID NO: 89744 - DNA, 273 bp, Glycine max
  Clone ID: 700905394H1
agaagatcgatcatggcttatatctcctctctatcatctttctccctctccaatttctctgcacctcttcccatttccatctgttcctcatcttccgccttcctaactttccagataccatgcatacccaccatacgtagcaaaccataaggccatcatgtttccatagtgtcatgcatcagtaaccagatcactccaacatcatacccagattgatgaggaaccatcgtcatacagcattctaggcaaacatcggagggatgttctccttgg

SEQ ID NO: 89745 - DNA, 275 bp, Glycine max
  Clone ID: 700905395H1
aatttggtttaggagaaaagatggaggaaataggatagggggtgggaaaattgatgaatagaggtatttctgcagtttggatggataggtgaaaacaaagggtcaatgtacagaatatgaaactgttctgtttccaaaatcactctctcttctggcatgtttcacacgctatgtagctatgcttctgtgaacttcccttcctattgaactgattgttctttcaaactttctattatgaaattttctttgttgggttttctttcaaggatttttta

SEQ ID NO: 89746 - DNA, 274 bp, Glycine max
  Clone ID: 700905396H1
gtttccttgctctttcatcttttcctctttctctatgcaaataaccgattgatcaatcgaatttttttgtgattcaatttcgctcttttttctcggcgcgagaaatcatggctttgggaacggtgactcgacggttggggaataaactcttgccggcgttatctccttctcccaggcttctacattctcacgccaccagtttcgggttcaaacaagtaaacgaagaagaaaaggctcgcatggttggtgacgtattcacgagcgttgcttcaag

SEQ ID NO: 89747 - DNA, 238 bp, Glycine max
  Clone ID: 700905404H1
cagaagctttcaaaaggtttggaagcaaactgactggaattgaaggaaaaatcaatgcaaggcacagtgatccaagtctgagaaaccggactgggccagttcagctgccatacactttgctccatcgttcaagtgaggaagggttgactttcaaaggaattcccaacagtatctctatctaattaaaaagagtttgtggtttccttatctatgttgtacttctgaataacatagactt

SEQ ID NO: 89748 - DNA, 236 bp, Glycine max
  Clone ID: 700905405H1
ccaagaacggctagagcggttgacgagaattggtggagatttaaatttagaatatgctgaagatagctgcgaggaagaaaatttggaggaaaaatctgagtgcatgttggtgaatgatagattagaagatagacatgatgacaatccaatgatttctcaatcaagcctaagaaattcctcacctgaaaacattgagaatgatagtaattatcccaagaaacaaatggttaacgggg

SEQ ID NO: 89749 - DNA, 234 bp, Glycine max
  Clone ID: 700905406H1
cgaggacgaaaaaggtacaaggaaccgattctagagagagaaagcgtgttgaatttctagagagagagagcggagggcgcgcgggatggttcagatcgcaaggaggaggaagaagggacggccgtcgaaggcggatctggcgcgccgctcaggccagtctccggccgccgcatcgcagcctgattctcggcggagctccggcgccgaagcgtgaggtacaacatcatcgactac

SEQ ID NO: 89750 - DNA, 218 bp, Glycine max
  Clone ID: 700905408H1
caacagcagctgcaaagtgtcaggcaaaacaacttacagaagataagtatagtgtccctggcggaacaaatggtgcttggaaggaagagttagaatctgctgttaaaaggtatgcatctgtcatgacagaacttgatgctgcaaagcaagcactgagcaagactcggcaagagtatgattcatccttggatgaaaaaatgtttgcgttcaagcaagca

SEQ ID NO: 89751 - DNA, 237 bp, Glycine max
  Clone ID: 700905410H1
cgaaatttaagtgaggagctagagaatgatgatgaagtctgctatgtgtgcagtggtggttgtagcacttcttcttctggcggaggtggggcccatggctgaggctgtgacatgcaccccaacagagttgagtccgtgtcttccagcaatcacttccggtgctaaaccttccaatgcttgttgcacgaagctgaagcagcaaaaaccatgcttatgtggctacctcaaaaacgctag

SEQ ID NO: 89752 - DNA, 235 bp, Glycine max
  Clone ID: 700905411H1
cagaaacagtgtgatgaaaatgaaggtccttgttttcttcgttgctacaattttggtagcatggcaatgccatgcgtacgatatgttccctctccgaatgaacactggctatggtgcccgtactccggaggtgaaatgcgcaagttggaggcttgctgacgaagcacacaacatctttggctttgagcccattcctgaagagtgcgttgaagcaacaaaggaatacatccatggc

SEQ ID NO: 89753 - DNA, 236 bp, Glycine max
  Clone ID: 700905412H1
gctctttcctccgatctcaggtgttgtttaagcttcctgtgttggcttggtatccttgcaagttcttctgtagcagattccaaggtgaaggtgtcatgttaaagtttctttcatgtttgaacaggctactatccatttgggagcaactgagctgcttggattgtatttttcttcttctagaaaaaattacagaccctcaccacccagacttagttgtatgaacggttggccacctt

SEQ ID NO: 89754 - DNA, 237 bp, Glycine max
  Clone ID: 700905413H1
cacccatccgcaaatgggaagcgatcatccgaagaattctaaacaaatcttctgatcctgaaagcaagcacaaaagctacagtgcccctcattctcctgttcaaaaaacttcttcttctgcttctgttaatgctctagcagacagtgtagatgttaatccactagacatgatgaacgaggagtatttaggaacttttgacaatgatgatctagaacaagaggaacagaaaagcagca

SEQ ID NO: 89755 - DNA, 238 bp, Glycine max
  Clone ID: 700905414H1
aataattgagacttgagagagaaaaaactaaactatagggcaaaatgagaaatatttgagctctcaacttcattgcccattcttgcccagaaccccataaaacacccaaggaaattgatgctgcttataagcaaggcggtggtttggcttttctagtaactttgactcactgacttcaaacacagtaaccaagcctcttccttcatgggaatatgagaatgaaactaaattcaccgtg

SEQ ID NO: 89756 - DNA, 223 bp, Glycine max
  Clone ID: 700905415H1
acttaggggaacaatcacagcatctggtgatcttgttcctttgtcctacattgctggtttgctaactggtagaccaaactccaaggctgttggaccctctggtgagattctgaatgccaaagaagcctttgaattggccaacatcggtgctgagttctttgagttgcaacctaaggaaggccttgcccttgtgaatggcactgctgttggttctggcttggcc

SEQ ID NO: 89757 - DNA, 94 bp, Glycine max
  Clone ID: 700905416H1
cgaactttcacttattcaatttctcaccatacaaattagagtcatcttctgcgttatatctttggctgccattaatgtttccacacaacatacg

SEQ ID NO: 89758 - DNA, 239 bp, Glycine max
  Clone ID: 700905418H1
caaatatttgcttcattccttcaccgccgcactatcgtttccgagaaccatcactttttctcgctgctcttcaaagcaatcgcaacgcgcgttttgcttctcttttcatcgcagatcctctgcgtcgccaccagattcactcacgtttcgtgattcgaacgcggcgtcgtttagactcaagcttgcgggagaagagaaaaccctaatcagacatggggaagaagaagccgacggcgagg

SEQ ID NO: 89759 - DNA, 237 bp, Glycine max
  Clone ID: 700905419H1
agtcacaatggtttcttctaattgctactatcttgcattggtatgctgctgtgttctgctgctgctgaaccccaccgtgggggagcaggacgagcagaacttggtgctccagtaccacaaaggcgcgctcctcaaggggaggatcaccgttaacctgttatggtacggctgcttcaacccaatccaacgctccacaatcgttgacttcataaagtcgttaagctcctccccgggggc

SEQ ID NO: 89760 - DNA, 234 bp, Glycine max
  Clone ID: 700905420H1
ctttctctgaactgttcaccgaggatgagattaaggatgccttggctgagtcatatcagaacatggatgaagagattgattttgagtccttcctaagggtacatttaaatctgcaatcccgagcaatagctaaagatggtggttcaaaaagttcttcttcatttctgaaggcagctacaacaactgttcatcatgcaattaatgaatctgagaaagcttcttatgttgcacata

SEQ ID NO: 89761 - DNA, 234 bp, Glycine max
  Clone ID: 700905421H1
gtttcttcctccttcaaacaccatcgcagattcttcgctcctttccattgattcaaaacatgattaccaccaccactcctgctagatcttttctccaagtcgccgctacagaggaggccgcgccgcctctcagagtcgttcagattgaaggactggttattctgaagataattaagcattgtaaggaccactcgccttctttagtcatgggacaacttcttgggttggatgttg

SEQ ID NO: 89762 - DNA, 232 bp, Glycine max
  Clone ID: 700905422H1
aaaaaaaacccacacctttttcactctctttccctaacagtcgcagattcaaatggagcccgagcccgaacccaagcttgagcctgagccagagcccgggcctgagtttagttcgaaagaggaagcattctcatactaccaaacctacgccaaatccgtgggcttttccgccataatcaaagcctgccgtcgatctcgaatctccggcaacttcattgacgccaaattcgcc

SEQ ID NO: 89763 - DNA, 232 bp, Glycine max
  Clone ID: 700905423H1
cggctttacagtgtttctcttccttcttcttcttcttcttcttcttcttcgttgaatcgcgattgttctgtgcgagagaaagaagagagagatcgaaaatggcgttggctttcgacgagttcggaaggccgttcataatcctgaaggagcaggagcagaagagcagactccgaggattggacgctcagaaagccaacatctccgccggcaaagccgtggctcgcatcctccg

SEQ ID NO: 89764 - DNA, 234 bp, Glycine max
  Clone ID: 700905424H1
ccttttggagaggatatgtctgcgtgcgtggatttgaccgggaaaagcgagcaccccgacctctgttggctagactacacttcccggttagcaggttgcctaagaatagggataagacccaacaagagtccgcatcggcaaactcacaaggattgaattttaaacaaaatccagaacagccagaattgctttccaacattcggcagaccggaggatcctgaaggcaaataattg

SEQ ID NO: 89765 - DNA, 235 bp, Glycine max
  Clone ID: 700905425H1
ctggtggaaagaacttgtccaagtgggtcatggtgatttgaaagataagccatggtggcaaaagatgcaaacttgtgaagagttgattgaagcctcggccaccctcatatggatcgcttcagcccttcatgcagctgttaactttggacagtatccatatggaggtttaatcttgaacaggccaaccattagcaggagattcatgcctgagaaagggtctgctgagtatgctgct

SEQ ID NO: 89766 - DNA, 234 bp, Glycine max
  Clone ID: 700905426H1
gtgaattatttaatgcgcgaaaatgggcagtgaggagaatagtgtgtgatccacttctttcatcgcttcggatcttcaatctcatctccgatctcaaaatgcccgctgtttatggagctcgcttgaccaccttcgaagactccgagaaggagagtgaatacggttacgttcgcaaggtttcaggacccgtcgtcgttgcggatggcatggctggtgctgctatgtatgaactcg

SEQ ID NO: 89767 - DNA, 235 bp, Glycine max
  Clone ID: 700905427H1
acaattcaacttaagagatcaatatggccaccaccactacccagcctccctctaatatctgttttttccttctgttgttgcttctagcacactttcatttgggcataagccaacttgagctgaattactactctaaaagctgcccaaaagctgaagagatcatcaaggaacaagtcacacaactatataacaagcatggaaacactgccgtttcgtgggtcagaaatctcttcca

SEQ ID NO: 89768 - DNA, 235 bp, Glycine max
  Clone ID: 700905428H1
tccaacaccaacaacaccatcctcaaaatctccaaactcgcgatcctcctcgttttgttcgcttcagtctgcaacgtcgctatgtcggactccaccgccaaacccctcgaccagcacgccaccacgggctctgaccctactgcgccagcggttcacatcgtgtacaccgagagaccacagaacgaggagcctgaggcctaccacatcagaaccctcacttcagtccttggcagtg

SEQ ID NO: 89769 - DNA, 234 bp, Glycine max
  Clone ID: 700905429H1
ggaaactcctcacaagaggcatcacaagtttattgaattctatgatgttagagcggccgaagcagcacttaaatcattaaacaggagtgacatagctggtaaacgcataaagcttgaaccaagtaggcctggaggagctcgtagaaatttgatgctccaattaaatcaagagcttgaccaagatgaatctcggagtttccgataccaagtgggttctcctgtagctaactctcc

SEQ ID NO: 89770 - DNA, 235 bp, Glycine max
  Clone ID: 700905430H1
tcacaaaacaaaactcagtttgtaactctcacaccattttcactgatatcccataataaccaccatggctcgacctaaagaaattgctaccatcatttaccacaatggtcacattgtagacgatctagttcaaggatcgatgtacatgtgtacgaccctaatatttttttacgccagtcgttctattacgtttacacaattcattcggagtattaacaatcgtctccttactcaa

SEQ ID NO: 89771 - DNA, 190 bp, Glycine max
  Clone ID: 700905432H1
gcctgccggaattgaattgaattgaagagagatgttgtttcaggtgggcgggcaaggcagtcgccccaccttcttcgagatggcggcggctcaacaactgccggcgagcctccgcgccgctttgacatactccatcggcgtcttggcctttcggagacccttccttcacaaactcctcacgctcgaagac

SEQ ID NO: 89772 - DNA, 237 bp, Glycine max
  Clone ID: 700905433H1
cacccttactggcaaaacaatcacgctagaggtggagtcctccgacacaatcgataacgtgaaagccaagattcaagataaggaagggattcctccggatcaacaacgtttgatcttcgccggaaaacaactcgaagacggcagaaccctcgccgattacaatatccagaaagaatcgactctgcatttggtgcttcgtctccgcggagggatgcagatcttcgtgaaaaccctaac

SEQ ID NO: 89773 - DNA, 235 bp, Glycine max
  Clone ID: 700905435H1
cgcaggattacagaagagtcagattgatgagattgttcttgttggtggaagcacaaggattccaaaggtacaacagcttttgaaggactactttgatggcaaggagccaaacaagggtgtcaaccctgatgaagcagttgcctatggtgctgcagtgcaaggaagcatgttgagtggagagggtggtgaagaaaccaaagacatccttctcctggatgtggctcccctcactctc

SEQ ID NO: 89774 - DNA, 135 bp, Glycine max
  Clone ID: 700905436H1
aaaaaagataacacagagagtagcgtcttaataaacgctcttctctgaaaaacctgatgtcttctcttcttctcttcgctttcgtttcgatcttcgatctctgaaaatgagagagtgcatttcaatccacatagg

SEQ ID NO: 89775 - DNA, 224 bp, Glycine max
  Clone ID: 700905437H1
cagcttctctaaattctctgtctacttcaccaagcacttttggttgcagctttggttaatttccaatatggtgtttcctctcctatctatctttgctttactcaatcttgcagtggtggcaacccatgcagaaaccttgccccctgaagtttactggaagtcgaagcttcccaccactccaatgccgaaagccattacagatatccttcacccagatttggcag

SEQ ID NO: 89776 - DNA, 229 bp, Glycine max
  Clone ID: 700905439H1
ctctcaaatctcttcgttccttcgattcgttccatttcttccaaaatggccaaagacccagttcgcgttctcgtcactggagctgcagggcaaattgggtatgctcttgtccctatgattgctgagggagtgatgttgggtcctgaccagcccgtgatcctccacatgcttgacattcctccggcagcagagtcattgaatggggttaaaatggaattggtggatgctg

SEQ ID NO: 89777 - DNA, 229 bp, Glycine max
  Clone ID: 700905440H1
caccgtagtaattctagagctaatacgtgcaacaaaccccgacttctggaagggatgcatttattagataaaaggtcaacacaggctctgcctcttgctttgatgattcatgataactcgtcggatcgcacggcctttgtgccggcgacgcatcattcaaatttctgccctatcaactttcgatggtaggatagtggcctaccatggtggtgacgggtgacggagaatt

SEQ ID NO: 89778 - DNA, 232 bp, Glycine max
  Clone ID: 700905442H1
cgccggctcggaggaggacaccaagccgcttatcggctcggctcggctcaagctggtggacattctcgacgacgttggaatcggcgagcgcgtgagccgcacgctctcgctgaagcgtccctcggggaggccgcacgggaaggttgaggttagcgtgacaatcagggagcccagctaccgtgcgcagggtgggtacaacgcgcctccttacggcgtgagggattattcccct

SEQ ID NO: 89779 - DNA, 229 bp, Glycine max
  Clone ID: 700905443H1
cgatgatggagatggcgaacgaagacgctgtcgttgcggcactcgcggcgttggtgctactcgcggcgagtgtggcggtggatgctcaggagaactcggacgtgaagacgctggtgaagtacaagcacgggaagaagtactgcgacaaaggatgggaatgtaagggctggtcaatttactgttgtaacctcaccattaccgattatttccagacctaccagttcgcgaa

SEQ ID NO: 89780 - DNA, 231 bp, Glycine max
  Clone ID: 700905447H1
cttttgtggattcaagaaaactaaatgaatcactgtttttgtatcatttgtatgtatgtagttcctttcttcatcatgattattatgatccgttcacacttttgtactctggtaaattggtttgttttcggcatctttgaggaatttgcttgtggcttttataaggaattaaggttggatgcttaaagggaggaaatatcccaaactgaaactatattcagttcgtaaaaa

SEQ ID NO: 89781 - DNA, 222 bp, Glycine max
  Clone ID: 700905448H1
cattactgcaaatggggtttcagatgagacagatttgattcgccggccatatctcttggagcatttgcttgctatttatgctgccatgatcatgggtgtgcgtgtacttggttacctgttctggactatttctgataactgggagtgggctgatggatatggtcccaagtttggacttgttgcggatgaccgggcaaactaacatgcacggaccccacgccc

SEQ ID NO: 89782 - DNA, 235 bp, Glycine max
  Clone ID: 700905449H1
cgatgatatttctatagttaaagagctgcctaaagagttcagctggagcacaagagagtactatggcttggctattcgggaaacccgaatcaaggctgcgcctgtgcatgcatcagcccattggtatctggagaatgttttgcctgttctacagagttatggtattgctgcaatctctccattttctcacagactgagttttgacaacttgcctatggatattcaacacctacgc

SEQ ID NO: 89783 - DNA, 231 bp, Glycine max
  Clone ID: 700905450H1
cgttaaacctcggagccagatattcagagcgggtcccaccgatgatggatactggcggaggaggcggacatcgtcaccgacagccaccatgtcgcggtggaagtttgcggcgtggcggcagttccagcacctgctggataaatcgacgccgcacgtgggacgccggtggctggggttcgcggcggttgcgcttttgtacgcgctgcgcgtgtacttggtgcaaggcttcta

SEQ ID NO: 89784 - DNA, 232 bp, Glycine max
  Clone ID: 700905451H1
ctctgaatgtgctcgttgtttagaaaaccctaatctgattcaattccagcatggctcaaaaacaaaagctgcgcccttctcctctggacgagccacccaccgcttcctcttccgattccgaggaagaagaggagcaacaacaacaacaaccatcctctcagcaacacgaacaagaggaagaagaagtttcctccggagaagaagaggaagcttcctccgaagaagaggaaga

SEQ ID NO: 89785 - DNA, 231 bp, Glycine max
  Clone ID: 700905452H1
ccaaacccaaaccccggatggcacagaagcagcacctccttctggatctatcccaaatctcaatctccaaaccctagaacgaacattcaagtttccccctttcccctttctcctttccctttcaaaaacactccctttccactcttccgctgcgattggatctcttgggtgtcttcctttccgcgatttcgatctgcaacttgagggttgtggaattcggaatttcacatt

SEQ ID NO: 89786 - DNA, 228 bp, Glycine max
  Clone ID: 700905453H1
cggggctaccgctgagtttaagcatatcaataagcggaggaaaagaaactaacaaggattcccttagtaacggcgagcgaaccgggaaaagcccaccatgaaaatcggtcgccctcggcgtccgaattgtagtctggagaagcgtcctcagtggcggaccgggcccaagtcccctggaagggggcgccagagagggtgagagccccgtcgtgcccggaccctgtcgca

SEQ ID NO: 89787 - DNA, 226 bp, Glycine max
  Clone ID: 700905454H1
ctttttctctctcaatctttgttcatcaaagtgctgcatctctctcactctcttacttaactcgacaacttcagccacattattccatggatgccaaggtattcaaattccagatcctccaaggctccatcgctaagcgcgtggtcattcgctcaatactactcgcgtgcgccgtctcaattgtctccatctaccgcgcgcaatccctcttcgatttcggaaccct

SEQ ID NO: 89788 - DNA, 223 bp, Glycine max
  Clone ID: 700905455H1
ccttggtgaaatcaccaacagtgcattcgagccatcatctatgatggccaagtgtgctccccgccatggcaaatacatggcgtgctgtctcatgtacagaggtgacgtagtgcctaaagatgttaatgcagctgactggaattatcaagaccaagcgcactattcaatttgttgactggtgccccaccgggttcaagtctggaatcaattaccagcctccgac

SEQ ID NO: 89789 - DNA, 228 bp, Glycine max
  Clone ID: 700905456H1
cagtatctgttccatttcctgtgaaacaatcgcaggagacaaagctttcccacttggatattgttggtagacctgttgttgtgctggagaagaacaatgttgtacctgagcataatgagcattttcaggtctactataagttcaacagtctttctatgctcagggagcctttgatgttgatttctggctttttatttctgtttgttgcgtgcattgtctacacgcatg

SEQ ID NO: 89790 - DNA, 230 bp, Glycine max
  Clone ID: 700905458H1
ccaagctcccctcgtgctggtaagcctctgcttccattggatgcaaaggaggatgaagagaaggagaaagcaaagccagttacatattcatatgccttcttccacttgattttctctcttgctagcatgtattctgcaatgcttctgactggttggtctacatctgttggagagagcgggaagttggttgacgtggggtggccttctgtgtgggttcgaatcatcacttc

SEQ ID NO: 89791 - DNA, 229 bp, Glycine max
  Clone ID: 700905459H1
gaagcatctgagtgcttattatttgtaatatatatagtcactcaagcttctaggatttgtgccagctacatgaaaatgggaagcaacttctggtttttgagtctttgcctcttggcattgattgcatcaacccatgctcaacttcagcttggtttttatgccaagagttgcccaaacgctgagcaaatcgttttgaaatttgtccatgaccatatccacaatgctccat

SEQ ID NO: 89792 - DNA, 230 bp, Glycine max
  Clone ID: 700905460H1
atggtatacaacataggatttactcttggcaggatggagtttcaggaactaattgtctaattccagcaggttggaattgtacatatgagtttcaagttaaagatcagatagggagtttattctacttcccttccctaaatttcctgagggctgcaggagtatatggaggaattatcataaaaaaccgaccagtgattcctgttccttttggattaccagatggagatatt

SEQ ID NO: 89793 - DNA, 224 bp, Glycine max
  Clone ID: 700905461H1
agataaaatgggttcttcttcgtctatgtggacggtgtgtgtgattttggcatcactggccttcgcagtatgctgtgccaactcacgcaggccagtggatgtacaatttggccgaaagtacgtgcccacatgggcctttgattacatcaaatatgtcaattgtggttctgacattcagcttcatcttgacaagtacactggtactggcttccagtccaaagggt

SEQ ID NO: 89794 - DNA, 232 bp, Glycine max
  Clone ID: 700905462H1
ccttgctcttcttcttcttctctctcaccctccaaattttctcactctctctttatcttcaccttttcagtttaaagcttcagatcacaaccgatccaccattcaccactttctcttcacaagctcaagttactgacaggcaaatctaacaagaaaagtagtctctgaagtcgatccagtgccttgtgaatttggaattggtggtgaatttagatctaaaagccatagcaat

SEQ ID NO: 89795 - DNA, 231 bp, Glycine max
  Clone ID: 700905466H1
ctgttgcacctctgattgcacttgcacggtctgaagcagaggatgttcatgaaactgccgcaggagcactatggaatctggctttcaatgctagcaatgctctaagaatagtagaggaaggtggagtatccgcacttgttgatctctgctcagcatcagtttcaaaaatggcacgattcatggctgcgttggcattggcttacatgtttgacgggagaatggatgaatatg

SEQ ID NO: 89796 - DNA, 92 bp, Glycine max
  Clone ID: 700905467H1
ctccgatcttaatatacattgactaaaagatgaataaagggatcagatttaagttccttgatctaataagatccttgcttttaattgtacta

SEQ ID NO: 89797 - DNA, 228 bp, Glycine max
  Clone ID: 700905468H1
gtgcaaaagagcgtcgtagtcgcaaccctaatcagaagaagcgcagcttcaagcgagtgacagccaccagccatgggtcgtatgcacagccgcggtaagggtatatcctcttctgctttgccctacaaaaggacacctcctagctggctcaagatctcttcgcaagatgtcgaagaaaatatctgcaagtttgcgaagaaaggtttgaccccgtctcagattggtgtc

SEQ ID NO: 89798 - DNA, 227 bp, Glycine max
  Clone ID: 700905469H1
cggagaaggaaaatgaagatgtttggaatgtgtggtggtagcgacgatgataatcacagagatgatgaagacaaaagcccgattggggcaagagaagatggcagccaatacagcctcacaggagttcttcttccgtctctcggggccacagctattcgcaatggcagcggtagaccaaagtttcgccaatacattgtctcaccatataatcgtcattacaaactatg

SEQ ID NO: 89799 - DNA, 223 bp, Glycine max
  Clone ID: 700905470H1
cacaggttctggcatgggaacactgttgatatcaaaaattagggaggaatacccagacagaatgatgctcactttctctgttttcccatctccaaaagtttctgatacagttgtggagccatacaatgccactttgtctgtacaccaactggttgaaaatgcagatgagtgcatggttcttgacaatgaagcactttatgacatttgctttaggacattgaaa

SEQ ID NO: 89800 - DNA, 224 bp, Glycine max
  Clone ID: 700905471H1
atgatgttggccatagaagccaatattgcaaatttgacaacgagctccttacactcttcacctcttccttgtatcttgctgcattagtagcttctttctttgcttccaccactacaaggatagatggacgcaaggcctccatgttcttaggaggcttgtttttccttgtgggggcattattaaacggcttcgccgtcaacattgaaatgctgatcataggccgc

SEQ ID NO: 89801 - DNA, 225 bp, Glycine max
  Clone ID: 700905472H1
cactaagtgagtgagaatgaaaatgttgcaggtggcaatagtgcaattggctgcgttgcaggtttttgttattttttttgagtggtggtgctgattacataccgccttcaaggttggatgggttcgtctaccaaaatgggtacttagatttggatactgttttgatagaagcgttttatgatccggtgtgcccatacagcagggattcatggcctccactcaaac

SEQ ID NO: 89802 - DNA, 228 bp, Glycine max
  Clone ID: 700905474H1
gcgcaacctcgttgccccccgaacatgggaaactgctgcgccacgccgtccaccgacgaaacggcgaacaagaagggcaaaaagggaaaaaaggaaaaccccttcgcgatcgactacggtttcaacgccaccgccgcgaacgggtcgaagctcaccgttttgaagtccccgacgggccgcgagatcgaggcccgctacgagctgggccgtgagctgggccggggcgat

SEQ ID NO: 89803 - DNA, 228 bp, Glycine max
  Clone ID: 700905475H1
gcgaaaaataaggcacaagctagtttgcgattaaagtaataagatagtgggacacttggatggataggaaggatctgtataggtctctgcaagaaaatgttaggagactcgaggcaggtgaatgactatatagtttaggttgtacatagaaatctcttgcaggaaaatgcaatttgcatccaaaggggactacccagttgcagaaagctcctgctgcatggatactat

SEQ ID NO: 89804 - DNA, 226 bp, Glycine max
  Clone ID: 700905476H1
ctggagttgtgattcttcaataccatatattctctctctttctctttttctttcttgatttgtgctgtgaaacagttagaagtggtgttgatgtctgaggcattggaagatgttccttcaatgaaaggagggtgtgaagaagaagaagaagggttgaacctgaaggctactgagctgaggcttgggttaccagggtgtgagtcaccagagagggagggtgcgttta

SEQ ID NO: 89805 - DNA, 225 bp, Glycine max
  Clone ID: 700905477H1
tccaagactttcatgatattgtttcttagaattttgtatttttttttataatttatttaattattttctccctacaaaatcttgatctctctgctgttgtggagtggtgttgtgttaatctcattcacacattcacagttatactctctctctctttgtcgcttggatcactgatctcatctcaattttcagatatgtcgacatctgataagccagaagtggtgg

SEQ ID NO: 89806 - DNA, 203 bp, Glycine max
  Clone ID: 700905479H1
gttacagaaaaacaaacacttatctctgtttctccgtcttacggcaattgaaggaagcactatctctgcaacttccgtcacattcacatggcagcttctgcatctgctactgctgtgccatatctagacaagacagattttctaaagcttcaaaatggcagatacattcgtggtgtggctgttgatggtgttgagggagagcc

SEQ ID NO: 89807 - DNA, 204 bp, Glycine max
  unsure (1)..(204): unsure at all n locations
  Clone ID: 700905480H1
cccgtagtggtggaggacaaggagggggtgtaggatatggtggtgatcatggagctggatatggtggcggtggtggtggtggtgcgggttatggtggtggtgtagagcatggtagtggaggtggttatggtgaaggtgaaggaggtggagctggaggaggatatggagctcttggggcacatggntgntggttttgaggaggcg

SEQ ID NO: 89808 - DNA, 229 bp, Glycine max
  Clone ID: 700905481H1
gggaaagctgtgccctcagcttcagcatgttgaattgagtggactcgagggagtgacagatgcagggcttcttccactccttgagagttataaggctggtttggttaaagtgaaccttagtggttgcacaaacgttaccaatcaagtagtttcgtccttggccaatctgcatggttggactcttgagaatctaaaccttgatggttgcaaaaacatcagtgatgctagc

SEQ ID NO: 89809 - DNA, 229 bp, Glycine max
  Clone ID: 700905482H1
gagaagatcggggattaacgaactatgaattgaactttctcaatggctcagattcccaacctagacaatgctcctgtcaatctcacatccattagggagcattcgcaaaaagagctcctcaacatcctcaagaatgttcgaggaaagaagttattagtcattgatccgaagctcggagactctctctcgcttatcatacagacatccattctcaaggagcatggagttg

SEQ ID NO: 89810 - DNA, 227 bp, Glycine max
  Clone ID: 700905483H1
gagctatgatatcgaatttggcatttgtattccgtaatatcttttccaaaaagggcatgaagggaaagtctgtcagtggaatgaattactatgcttgtttatctattttgtcccttgcaattctcacacccttcgcaattgctgtggaaggaccacagatgtgggctgctggatggcaaacagctatgtgtcatattggtccccaattcatatggtgggtagctgct

SEQ ID NO: 89811 - DNA, 227 bp, Glycine max
  Clone ID: 700905484H1
ctttctcaaattaattaattccctttattatcaaaatggccctggctatggctgcttgcagtccttggacttcacttgagtgctgataacaccttgagaccttttgaaaaaaccaccgtcttgaaggccctctctatctcttatgttactaaaccatgttacatttctcacaaaacaagattatcatcaccttcatcttcaggaataacaatgatcgcacgagcaac

SEQ ID NO: 89812 - DNA, 223 bp, Glycine max
  Clone ID: 700905486H1
ctggtgtgacatgttgtcttcgattccctggtcaactcaactcagatcttcgcaaactcgccgtgaatctcattcccttccctcgtctgcacttcttcatggtgggatttgccccactcacttcccgcggttcccaacagtacagggctctcactgtccctgaattgacccaacaaatgtgggatgctaagaacatgatgtgtgcagctgatcctcgccacgg

SEQ ID NO: 89813 - DNA, 224 bp, Glycine max
  Clone ID: 700905488H1
gcctggaaaaaaagttagcatgtatattgctaggttgagaaattctaaaccaggagttcctcttatatctccacctcctcatcatgatatttattctatcgaggaccttgctcagttgatctttgatcttcatcaggtgaaccctaaggccaaggtgtctgtaaaactggtggctgaagctggaattggcactgttgcatctggggttgcaaagggcaatgctg

SEQ ID NO: 89814 - DNA, 227 bp, Glycine max
  Clone ID: 700905489H1
aacaataattcagaaatgttactgcaaacattagctatccctacaatactccttgtgatattcatatgggtggtacaaccaaagcaacgtcatgggaagattgcaccaggtcccaaggcgttgccaattattggtaacctccacatgctagggaaactcccgcaccgcacccttcaaacctttgcaagaaaatatggacccataatgtccttgaagctagggcaagt

SEQ ID NO: 89815 - DNA, 226 bp, Glycine max
  Clone ID: 700905490H1
ctctctcccttagtcaaagggactcgttgttcttctcccaggttatttagaaaagcaaaatggtgaagatttgctgcattggtgctggatatgtggggggtcctactatggcagtcattgcacttaagtgcccatccattgaagttgctgttgttgatatctctaaatcccgcattgcagcctggaacagtgaccagcttcctatctatgaacctggccttgatgg

SEQ ID NO: 89816 - DNA, 225 bp, Glycine max
  Clone ID: 700905491H1
tttaagagtgagatagtagagagagagagaaacacaactgctttgccaaaccttaatttcagggcacttccaagctaacaggaatatatgttgttccctttttgtgttgtttgattcagcgatttctggttttcgttttttttctttctttgttacaaggagagttcgatgtctttaagttgaataacttgttgggacatatttgactcggtgcttttcttttgg

SEQ ID NO: 89817 - DNA, 226 bp, Glycine max
  Clone ID: 700905492H1
cccaaattaggattaggattagggctaccaataccaataccaataccaattctattctatggcttgctcaagcgcccaaatacacggtctcggaaccccttcctcccgaaccctatttttaggtcagaggctaaataccaaggccgcctttatcaagctcaagtccacacctagaagactccgccctctcagagtggttaatgagaaagtcgtcggtatcgatttg

SEQ ID NO: 89818 - DNA, 209 bp, Glycine max
  Clone ID: 700905495H1
aagagggggtcagagtgagaaagagaaagagagaattcgtaaaccctaatttcggaaagatcggcgatgactccctccaaggatcgcgagaacttcgtctacatcgccaaactcgccgagcaggccgagcgttacgaagagatggtggaatcaatgaagaacgttgcgaatctcgacgttgaactgacggtggaggagcggaatttgct

SEQ ID NO: 89819 - DNA, 171 bp, Glycine max
  Clone ID: 700905496H1
gctcactgaatgcagtagccaatgatggaggatggatatatcttggaactaacaaaactatggcaaaatcaagtagcactggctacagtcagtggtccctctcaaaggatcatcttcaggtgggtgatacagtgcgctctagaaagctttccaattcatgcaatcctcaaa

SEQ ID NO: 89820 - DNA, 271 bp, Glycine max
  Clone ID: 700905502H1
ctttcccttctgttcactcaaaagagcagaaagagacaagatcccggaaaggcgtgccggcgtcagagactcatcagttctcactcgtacggcgttgtgctttgctttctcaccttcttcttcatttctttcatcatcatcatcatcacaatataaagttcgctcctttctcagtctttcacccatacccagatgggtaacagcaccatctcggatctgtgtccctcctttaagtgaaaaaggatgccttgcagggtgctgcttccaatct

SEQ ID NO: 89821 - DNA, 262 bp, Glycine max
  Clone ID: 700905503H1
ctttggtggccacagcaacaataacaatggcagcctcactacaagctgcagctaccttcatgcaacccaccaaggtgggcatggccactcgcaacctcaaatctacacaatgcatttctaaggcttttggcttggaacccgctgcagctaaactcatttgctcccttaagcccgatctcaaagattttgctcaaaaatgtgtcgacgccaccaaaattgcaggattcgcccttgggcactcagctctcggtgtttctggagc

SEQ ID NO: 89822 - DNA, 257 bp, Glycine max
  Clone ID: 700905506H1
tgatccccaaaaaataatacccaggataatgcatggcttactctctctctctgcaacaattagggttttaaacctttaatccaatccagaaactcacatttattatcttactgcgatttttccacctcgcgcgatatggtattgtccctttccatttcccattagcttcttctcctcacgcccgctcatgagccaccatcgcaacaaccacgctgcgctcactggttcaaccggcgatgcgaatcccgatgactgtc

SEQ ID NO: 89823 - DNA, 115 bp, Glycine max
  Clone ID: 700905507H1
ggcgatctggtaaggagcttgagaaggagcccaaatttttgaagaatggtgatgctggtatggttaagatggatccagccaagcccatggtggttgaaactttctctgagtatcc

SEQ ID NO: 89824 - DNA, 264 bp, Glycine max
  Clone ID: 700905509H1
caaagttcggtggttcaatatgtatatagacgtgttgtttcaacctgatttttgcgatacagactcaagtaccaatcacttctgctaaggagttatctttgcttactgaagaatattgcattcctgccatgtaccaattctcggtctcttccagtgttatagcgtcggtaggatcgaagatggttggcatgtagccatttgttttggctgggtgataatatcttaatagaatatggaaatgttgtgacgaactctgcagtagca

SEQ ID NO: 89825 - DNA, 262 bp, Glycine max
  Clone ID: 700905510H1
cgaaactcttgattaccataaccatgtcaatggcaacaacatcccctcacaccgccctcttccaaaaccgcaccaaccctttcactctctcctccttcaaacccacatccatcaaatgcgccacccaactccatacccaagccccgcccctcacccactcccaagatcgcgtcttcaacttcgccgccggtcccgccaccctcccggaaaacgtcctcctccgtgcccaatccgagctctacaactggcgcggatccggcat

SEQ ID NO: 89826 - DNA, 262 bp, Glycine max
  Clone ID: 700905511H1
tttccttctcctaaccctctttcctattaagaggagaaggaataacaaaaacaatatacacaatggctttcgctttcactttcaccaaaaccctaattctcatcgtctccctctcctccctcctcctccaaacccacgcggcccgcggcccccgcaccgtccaggcccgcctctacagcctctgcaagcccaccaccaatgttgggctgtgctacaggaccatcctgccggaggtgctgggcctgccccgcttcaactatta

SEQ ID NO: 89827 - DNA, 265 bp, Glycine max
  Clone ID: 700905512H1
ctacaaaggaaggactgaagatgataggttggttgctgtgaaacgcttcaacaagtctgcttggcctgatcctcgacagttcctagaggaagcaagggcagtggggcagctgaggaatgagcggttggctaacttggttggttgttgctgtgaaggggaagagagattgcttgttgctgagtttatgccaaatgaaactctctccaaacatctctttcactgggagagccagccaatgaaatgggcaatgaggctgagagtggct

SEQ ID NO: 89828 - DNA, 266 bp, Glycine max
  Clone ID: 700905513H1
ggccttactttcagaggaattcccaacagcatctctatctaatgagagtgtgtggtgtgtggtgtgtggttttctttccttccaacgtacctctcattgacaaataaacgtgcaaacttatgtgtgcataattttcttatgtatgcttaagttttgtaattggatgctatctagtttttcatatctaatagggtgttgtgtcagtttttatgtatagtattgtgctcctatcatgttcacccgtatcatgttcacccgtatgtaag

SEQ ID NO: 89829 - DNA, 268 bp, Glycine max
  Clone ID: 700905515H1
cagcacctcattccccaagtgatcctacagtgaagaaagttgctgacaaattggcaagttttgtggctaaaaatggaaggcaatttgaggatgtaacacgtcaaaaaaatcctggggatacacctttcaaatttttgtttgatgagagatgtgctgaatacaagtattatgaatatcggcttgctcaagaagaaaatgctcttgtgcaatcaagggaatcacaggtgcctcgtaatgggggtacaagcacttcatcttccaaacagac

SEQ ID NO: 89830 - DNA, 267 bp, Glycine max
  Clone ID: 700905516H1
ctttccctctctaactgtgctgatggtcttatcgacgtcatccagggctccactgccatcaccatctcaaattgccacatgaccaaacataacgatgtcatgctgttttgtgctagtgactcatacagcggagacaagataatgcagataacagtggcattcaaccacttcgggcaaggactggttcagaggatgccaaggtgcagatggggtttcgtgcatgtcctcaacaatgactacacccactggatgatgtacgcaattggt

SEQ ID NO: 89831 - DNA, 269 bp, Glycine max
  Clone ID: 700905517H1
aaacaatcatgcaatagaaatctttcaagatcatgtaaggagctccatagagaacttcaaagcttgagggacatcagatctgacttacttactccgtctaaagattcaagaaagaggagggacatgactgatgttcgaattctttacagccaccacttggatgaagatattgttaagcatcagaagaagattttagcacggcttggagtttctgtggcttcctccattgcagatgcaacccatttcatagctaatcaatttgtgcgtac

SEQ ID NO: 89832 - DNA, 264 bp, Glycine max
  Clone ID: 700905518H1
gaaggagaccctcattgaccttacagttatagaaatcttgtcaaggcacgcatctgatgagttctaccttgggcagagagatggtggtgactactggacttctgatgccggtccattagaggcatttaagaggtttggaaagaagcttgaagagattgaaaagaagcttatagagaagaacaaagatgagacattgagaaaccgctatgggccagctaaaatgccttacactctgctctatccttctagtgaggagggattgac

SEQ ID NO: 89833 - DNA, 264 bp, Glycine max
  Clone ID: 700905520H1
gtttgttgtgagctataagctagtttatcgtgaggagaatatgaagttgtttgttttctttgttgctgcagtagttttggtagcatggccatgccatggcgcaggctaccaaaggttccctctccgaatgaaaactggctatggtgagcgttcttcggaggtaaaatgcgcaagttttaggcttgctgtggaagcacacaacatccgagcctttaaaaccattcctgaagagtgcgctgaaccaacaaaggactacattaatgg

SEQ ID NO: 89834 - DNA, 265 bp, Glycine max
  Clone ID: 700905521H1
tgtgaatcagcaccacattcacctgagctttttgtgacgattccaaagcatggcttcccttgcagcatccactgctgctgcttcccttggcatgtcagaaatgcttggaaaccccatcaacctcagtggtgccacaaggccagctccatctgcctctagccctgcctccttcaagactgtggctcttttctccaaaaagaaggctgcacctccaaaaaaagctgcagctgctgctcctgccaatgatgagcttgccaagtggtat

SEQ ID NO: 89835 - DNA, 262 bp, Glycine max
  Clone ID: 700905522H1
ctctctctcaccaaagccttcctagaacgaaaaaaaaaagaagagcaattttccctcaccaaagaagaagaagcaaacaatggccgatcaacttaccgatgaacagatctccgagttcaaggaagccttcagcttgtttgacaaggacggcgatggttgcatcacaaccaaggagcttggaactgttatgcgttcattggggcaaaacccaactgaggcagagctccaggacatgatcaatgaagtggatgctgatgggaat

SEQ ID NO: 89836 - DNA, 263 bp, Glycine max
  Clone ID: 700905523H1
tgaagattctccttttcaaatttcaacctttttcccccaaaactaacaaacccctcttcttctcaatcattgcatggctcttcactgattctataataataatttcagattcgtttttcgttttttgttaccatggagttgatttcaggtctaccagaggacgtagcccgagactgtttgattagggttccctatgatcaattcccggcggttgcttcagtctgcaaaggctggagcgcggagattcactcgccggactttca

SEQ ID NO: 89837 - DNA, 223 bp, Glycine max
  Clone ID: 700905524H1
ctagactcttccgtttctcttctctgtctaaggggtgccctgagatcacattgaacaatggtgaaagctgtgtgccgtctttggagcagtgagggtgtcactggaactattcacttcggtcaggagggaaatggtcgaaacaccgtgactctatgccttgctggtcttaagcctggtctccatggtttccatgtccatgccttgggggacactaccaatggtg

SEQ ID NO: 89838 - DNA, 263 bp, Glycine max
  Clone ID: 700905525H1
cgtgtttcatttgtgaaactaacaacaacacaaggccatcatcatggcagctgcttcgccaatggcaagccaactcaagtccaccttcactaggactcttgtagctcccaagggcctctctgcctcttcaccacttcacctcgtgccttctagaaggcaatttagcttcactgttaaggccatccaatcagagaagccaacctatcaagtgattcagccaatcaacggtgacccattcattggaagcctggaaaccccagtta

SEQ ID NO: 89839 - DNA, 260 bp, Glycine max
  Clone ID: 700905526H1
cattttcctaattaatcagaccaaccaccaacgagatgatttctgagtccctcttggtagtattcctcattgtcttcatttctgcttcccttctcaaactcttgtttgtgagagaaaacaaaccaaaggcccacttgaagaacccaccaagcccacctgcaatacccataataggtcatctccacctccttaaacccctcatccatcactcattccgagacctctctctccgatatgggcgcctcctaagccttcgaatt

SEQ ID NO: 89840 - DNA, 262 bp, Glycine max
  Clone ID: 700905528H1
cgaaatggaagatgatgtggtctgaggcacctcttggtattgtttccccattgatggtgagggtgttggcagcaaagattcccaattctttatgcttgatattcaagtcatatgacatactgaaaggtcaggtcaggggcatgctattattcccattttcagcgaggaactgatgatactggttatagtgctgtaaagaaatattatatctgaaattttgtttctgccgagagttaactgacctgtagatgttaagccatca

SEQ ID NO: 89841 - DNA, 262 bp, Glycine max
  unsure (1)..(262): unsure at all n locations
  Clone ID: 700905530H1
agaatccacacaaactcagggtgaangagagagagagagagagagagagagagagagagagaatacgagtgtggtgtatcgcggtgcatggtggcgcttgtgtcgactctaatctcccactcgagcgccaagaagaagcgaaacaacttctcacgcgctgtctcaatcttggaatctctgctctaaattctaatcttcccgccatatatgtcgtcgaacttgtggtgagggaattggaaacggatccgctgttcaagtcggg

SEQ ID NO: 89842 - DNA, 265 bp, Glycine max
  Clone ID: 700905531H1
ggggaagaaacatttaatttgggttgataatagtttatgttaagatatcactactgctatatatatgttgccatagccaagttagccttataaagggaaactcacttgccttatttttggttttgagattgagctaaaggccaactcaaccatcgaatttgttggtgattgaaagagaaggaagaagaagcaggaaatggaagcagtgagagctggtcgagaaggagcaataggtctaggtcaaggtgatggcgtacaagggaca

SEQ ID NO: 89843 - DNA, 116 bp, Glycine max
  Clone ID: 700905532H1
atcaaaacaacctgctttctctcaggttcttgatcagtgtcaaaaccaaaagggtggttgcaaattgcaatggctaagcatgatgttgagggtggttccttcgctggcaaggacta

SEQ ID NO: 89844 - DNA, 85 bp, Glycine max
  Clone ID: 700905533H1
gtttgaggcggagaatagctccaacagttcccaaattggaaccctagcattcgccattgccgccacctttccccacgcagctttt

SEQ ID NO: 89845 - DNA, 260 bp, Glycine max
  Clone ID: 700905538H1
ccggtgcacagatcttctcagagggaggccttgactacttgggcaacccaaacctgatccatgctcagagcatccttgctatctgggctgttcaggttgtgctcatggggtttgttgaaggttacagagttggtggtggaccacttggtgaaggacttgacccaatctaccctggtggtgcttttgaccctcttggtctggctgatgaccctgatgcattcgctgagttgaaggtcaaggaactcaagaacggtcgcttg

SEQ ID NO: 89846 - DNA, 263 bp, Glycine max
  Clone ID: 700905542H1
tttccatctagagttgttgcggctctcttctctgcacactcagaatgcagtccacactcttcaacaccgaacattcccttatccccacttcaccacactctatcagatccaattctggtcatgcttctctctccgttcgcgcctccatcgccgtggaaacccccacggagacggtgaagctgaacaagtacagctcccgcatcaccgagcccaaatcgcagggcgcctcccaggccgtgctctacggcgtcggtctctccgag

SEQ ID NO: 89847 - DNA, 251 bp, Glycine max
  Clone ID: 700905545H1
cagaggggcagtagccgagattccgtgagttgcaaaaatgaagacgattctttccaccgagaccatgaaataagcggacggcgtgagcatcaaagttcatgccaaggtcatcgaagttgagggcccccgcggaaaattggtgcgagacttcaagcatttgaatctcgattttcagctcattactgacgagaacggtataagaaagctgaaaatcgacgcgtggtttggttctcggaaaacatccgccgcca

SEQ ID NO: 89848 - DNA, 266 bp, Glycine max
  Clone ID: 700905546H1
cctcgagcctgattcggctcgagctgagcctctgtagaaatttgtcatggcatccgctatgctgaatcgaggtggttctagcatcatcaaatccctgtcttcaactcttggtacgaggttttacgccaaggttgcaacagggactgacatagtctctgccgcacccaatgtttctctccagaaagctcgtacctgggacgagggcctggcttccaagttctccaccactcctctcaaagacatcttcaaggacaagaaagttgtca

SEQ ID NO: 89849 - DNA, 265 bp, Glycine max
  Clone ID: 700905547H1
gcagggataaggattgcttgagcaagtggttttctccatgtgagaaattgggtctctctgctgagcacggttacttcactaggtggaccaaggattctccttgggagacttgcggattgacgaccgattttgaatggaaaatgattgcagaacctgtgatggcgctttatactgaagcaactgatggttccttcattgaacataaagaaagtgcaatggtttggcaccatcaagaagcagatccttattttggatcatgccaagc

SEQ ID NO: 89850 - DNA, 265 bp, Glycine max
  Clone ID: 700905549H1
cgtcctcgtcaccggcgctgcggcttcgtcggctcccacgtctccctctcgttaaaacgacgcggagacggcgtcgtcggactcgacaacttcaacgactactacgatcggtctctgaaaaaagcccgcaagtccctcctcgccaagcatgacgtcttcatcgtcgatggcgacctcaacgacgccaagctcttagcgaagctcttcgatgtggtcgctttcatccacgttatgcacctcgcggcgcaggccggggttcgctacg

SEQ ID NO: 89851 - DNA, 260 bp, Glycine max
  Clone ID: 700905551H1
cttcaacctcaccaaaggaactaagaatttcattgaggctagagaaagtggtgatcaatatgtcaaagaatccaaaagttttctttgatattctaattggaaagatgaaagctggacgagtagtgatggagttgtttgccgatgcaaccccaaaaacagctgaaaacttcagggctctctgcactggggaaaaggggattggacgatctgggaaacctttacactacaaaggttctgtatttcatcgtattattccagaa

SEQ ID NO: 89852 - DNA, 258 bp, Glycine max
  Clone ID: 700905555H1
ggaactttctattcagctgcaagagaccccattttttattctcatcattcaaacattgataggatgtggtccatatggaaaacacttggtgggaaaagaagggattttactgattcagattggttagaatctgcgtgtctcttctacgatgtgaacaagaaccttgtgcgtgtgaaggtcaaggattctcttgacactagaagactacggtgatattaccaagatgttgacattccatggttaaattctaacgccacg

SEQ ID NO: 89853 - DNA, 262 bp, Glycine max
  Clone ID: 700905557H1
ataataacaacaataacgcaagtaatggaaattctaagagtagcttcagcggtgaacttgtccctgaagaaaatttcttgggtatatgcagtagagaattattagccagaggttgtgaactcctcaaacgcacacgcaaaggtgatcttcattggaaggttgtatctgtgtatgtaaacaggatgaatcaggttatattgaaaatgaagagcaggcacgttgctgggaccatcacaaaaaagacaaagaatgtggtgcttga

SEQ ID NO: 89854 - DNA, 167 bp, Glycine max
  Clone ID: 700905558H1
ccacctctaaaagatgtgtgtgttgaaagtgtcgcactagaaaaaagaagagtcatatgaccatgtgaaagtatttattggccctccgctaaaacaataagcatttagatcatccctgctttctgggtactgtacatatgcatgatagagctccctttagtcgaatt

SEQ ID NO: 89855 - DNA, 263 bp, Glycine max
  Clone ID: 700905560H1
ggcaattcgaattgcagtgtttacataggcaatctggatgagagggtgacagacagggtcttgtatgatatattaattcaagcaggacgagtggtagacttgcacattcctaaagataaggaatcagagaaaccaaaaggttttgcctttgcagaatatgaaactgaagagattgcagactatgctgtccggcttttttcaggcctcataacactgtacaacagaacacttaagtttgcgatatctgggagagacaaaactac

SEQ ID NO: 89856 - DNA, 263 bp, Glycine max
  Clone ID: 700905561H1
cccatttgcagagctgtggagatagcagcgaagaagagttatcggtgcttcctcgtcacaccaaagtggtcgtaacaggaaataaccgcaccaaatcggtgctcgttggtcttcaaggtgttgttaagaaagccgttggactaggtggatggcattggctggttcttacaaatggtattgaagtgaagctacaaaggaatgctcttagcgtgattgaagcacccaccggtaacgaggaagatgatgaccttgagtttgaaaat

SEQ ID NO: 89857 - DNA, 265 bp, Glycine max
  Clone ID: 700905563H1
ctcagattgcaattgcctcttctcttctcccagaatcggtgtaggttacaggtttaagggttttgttttcatttaggtcactaatccgatatcatgaagctcgatacgactagtctcgaatcgtttcccacactgattgcacctcaaaacgacgtcgccggagaactctccgccgctccgttctttgaccttccgaattccaatgacttcgatgggttcttgaaagacgctattcagatggtgaagcccgcgaagggtactacaa

SEQ ID NO: 89858 - DNA, 263 bp, Glycine max
  Clone ID: 700905566H1
gggacatcaagcgccatctattgcctcgatctcattagaaaggttcctctattccagaactcggatgatcgtattcttgacaacatctgtgacagggttaaactcctagtcttctctaaagatgaaaagataatcagagaaggtgatcctgtaccaaggatggtgttcatcgtccgagggcgcataaaacgctaccaaagccttatcaaaggcatggtatcctcaagcatccttgagccaggagggtttttgggtgacgagct

SEQ ID NO: 89859 - DNA, 258 bp, Glycine max
  Clone ID: 700905567H1
tggcatcgtccaaggtatcgacgacgacgacgacgacgacgaattcggatatttcgagccagcaggtatgggacggcgccaccatggagatggagtctcaagacaacatgaacatgagcatgagcctccaggatttgttgaccgaaaacgacgccgtgccaccctctcatagtcatggaaggggaaagagaaaaaccctagtggaggaacccctcgtcgtcgataaggtcactcttcagaaacagagaaggatgataa

SEQ ID NO: 89860 - DNA, 259 bp, Glycine max
  Clone ID: 700905569H1
agacaagagtacaaggatttgctgtatggcttagagaaggcgtcgcagagggttgtgatggctaagagcgaacttggtctgatccggaaacaagaatttgctgtcaagcagttgaaggattacgtcagccagcttgaaagcaaagttttcgagattggagaatgtcaaagagacatatcagaggcaaaagccttggtggacgaagcagaacgctctctgttggtaaatgttggaggtcctgaaaatggcagtacatcca

SEQ ID NO: 89861 - DNA, 254 bp, Glycine max
  Clone ID: 700905574H1
ttcacaactcggggagttgttgttgtggttcatcttcctcctctattcactggcacttgatagatccctctctcacagcttccattcgcaatccagtttctctttgatcggatgcatcttctgggttttgaaccttttactcctcatcaacattatttgttgagggataggttgtgtcatttcagtttgatcagctttagaatctcaagacatcagttatggctccttctaggaaatctagaagtgtaaataag

SEQ ID NO: 89862 - DNA, 261 bp, Glycine max
  Clone ID: 700905575H1
catggatcgtgattacagaactgcaaccaataaccaacaagcctttacgtacaagttcacaacacatgtttcacaaatgtagcaagaccaacactcaaacgcgagttcagaatagggaagagaacaaatatcagctcaccagctcattgaagggaagagaagtggataacagtgatcaaagtttgaaatggaagagatgaggtcaagaaagggaatagctacctttggagtgtttcgagtttaaaggagagggaatacagc

SEQ ID NO: 89863 - DNA, 255 bp, Glycine max
  Clone ID: 700905576H1
ataaaagacgagcagagggatccaaacccgaattagaaacgatttcggaatccctaattcgcaaatcgcaaccctagttgtgctgtgcgttgttgtagtggtttttggaagaggaggcttgagctaaacgctgcgtttcgacgacgatgatcgtgagccagaacatggtgacggaggcggaaattatttgcaagcagaacattccgatgttggacgtgaagaagtaccaccttcgcgtggcgcaatagctcggcg

SEQ ID NO: 89864 - DNA, 258 bp, Glycine max
  Clone ID: 700905577H1
aaaaaccattattagcctgcgtttgttttgaaagatttttctgaagttcactaagttaagccaagtcaatgatttgctgttgcctatggttgaagttgtttctttctgagggaataattagagatgatctgcactgttgaatatttacggcagataaatgagatagtgaagtttacattgttcttcctgttaagctgtgttaccttgaattgtactggttatatatatccatttcgtttctaattcaaatcaaatgta

SEQ ID NO: 89865 - DNA, 263 bp, Glycine max
  Clone ID: 700905579H1
gctacaagcccaacaaacttggttttaattggtataggcgtgccaaggtcttgttaattttgagcgttaagtgctgcaactaatcagatcccaagaccttggcctaccttgccatacagaaaaaaaaaaagcaaaaaaaaagccaaggtttggagccaacaaaaattaacacaaagcacaagtcatggaaagaataatggttggaagtgcacaaaggttgctttcaccctcttggccactttcgccattggtcattccaggcc

SEQ ID NO: 89866 - DNA, 264 bp, Glycine max
  Clone ID: 700905580H1
aaatttctctgaagtaatagaaattcttcagcagatagcaaaagaggtcaatgatcacaaagataaagcatcccatggctttctctcagctcttagacggggccatcattgatattgatataagagtattacgcgacagtatagcctttttgtcctgtatagtagtcagactctgactaaatatctattgagttcgttgtttataatactcttgagagattccgttgtattgtgtttgccttaaatttctgttacaatctgcgc

SEQ ID NO: 89867 - DNA, 141 bp, Glycine max
  Clone ID: 700905581H1
ggctcgagccgaatcggctcgagctcacccttctttgactgttctagcacaccacacccatgagactcctcctgctccttagtctcctctttcacgcggcggaagccaagggacagtggcagctcctccacaaaaacatcg

SEQ ID NO: 89868 - DNA, 264 bp, Glycine max
  Clone ID: 700905582H1
tgcttatagagatatttatgaaatatggctgcaatcacagagaacaagcaatgtaagagacaagacaccggatagagatgagtggactgaagatgttaatgggaagaaaatggctcttattcgccagatatttatggaagctaaacgtctgtctacagatgagagactacgccagtccaaggagtttgaagatgccttggaagttttaagttccaataatgatctgttagtcaggttattggattctcaaaatctttatgaact

SEQ ID NO: 89869 - DNA, 262 bp, Glycine max
  Clone ID: 700905583H1
taaaatatattatgaacaattcaggtcaaagcatatattttgattacatccatacccttgggaggaacctgattgctgatagcatcaagaagcaaaggataaggcagtcaagtggtatggatgtaatcaaaatatattatgaacaattcaggtcaaagcatatatcgcgggatgattttgtgaagatgctgaggttaatagttggagatggtctgttgagaactacaatagaagatcttcagttcaagataccttccggtgg

SEQ ID NO: 89870 - DNA, 235 bp, Glycine max
  Clone ID: 700905585H1
cgcactcaagaacatgctgtgacagcgctcctgaatctttccatatacgagaataacaaaggaagtattgtttcttcaggagcagttccaggtatagttcatgtgctgaagaagggaagcatggaagctcgggaaaatgcagctgcaacacttttcagcctttcagttatagatgaaaacaaggttacaattgggtctttaggagccataccaccactggtgacactgctaagtg

SEQ ID NO: 89871 - DNA, 257 bp, Glycine max
  Clone ID: 700905586H1
atacccgtttgaattctctactgttgaaatgccgtatgaatcatacaatggaatcaatgttaggcttaggtacattttgaaagtgacaattagtcgaaattatgtcaacaacattgtggaatacatggattttggtgtacgcaattatgctccagctccacctattaataacagcattaagatggaagtaggaattgaagaatgcttacacatagagtttgaatacggcaagagcaagtatcatctgaaggatgtca

SEQ ID NO: 89872 - DNA, 253 bp, Glycine max
  Clone ID: 700905587H1
gcaaaggtgaactatgaagcaaatggctgggttgtacatcaagtttctgacatatgggggaaaacatcaccagatcgaggtgaggctgtttgggctttatggccaatgggtggagcttggctttgtacccatttatgggagcattattcttatacaatggacaaagtttttcttgaaaataaagcatatcctttgttggaaggatggacatcatttctgttggattggttgattgagggccgtggtggattat

SEQ ID NO: 89873 - DNA, 261 bp, Glycine max
  Clone ID: 700905589H1
gctcgagctctcaacaaaacccaccgttttctgcgaaaatcaaacccacactcaccactctccaatctcccattctcccctctttctccaactcagcgcaaccgtcacgattgcgcccaaaatctcgatcttcactgcgaggcgtgttttgtgagcacggaatacgaatatggatcaccaagaggatgaaagtaacagcaaacaagacgatgaggaagctgttgctcgccttgaggaaataaaaaaatccattgaggcgga

SEQ ID NO: 89874 - DNA, 258 bp, Glycine max
  Clone ID: 700905590H1
aagatagtagaagatggcagacactgaggatattcaacctcttgtttgtgacaatggaacaggaatggttaaggctggatttgctggagatgatgccccacgtgctgtgtttcccagcattgtaggtcgtcctcgtcacactggtgtgatggttggcatgggccaaaaagatgcatatgttggtgatgaggcacaatctaagaggggtattttgactctcaagtaccccattgaacatggaattgtgagcaattggga

SEQ ID NO: 89875 - DNA, 260 bp, Glycine max
  Clone ID: 700905593H1
gcaaagctgcctttgtatgctttcaagaaggctaatggaaaggatttggccctgcatgcatgcgccggggagcctcccctcacattcctcgactcacttcttctgggagagtgggaagatcgcatgcagagaggactttttcgctatgatgttaccgcctgtgaaaccaaggtgattcctggtgaatatggtttcgttgcccagcttaatgagggtcgtcacctcaataagagaccaactgagttccgagttgacaaggt

SEQ ID NO: 89876 - DNA, 263 bp, Glycine max
  Clone ID: 700905594H1
aatgtggggaaaagcaaccgaagagaatgtgggggaagatgtccctggccagcaatcaccaaccacagaaaacgttcctctcttgcaaagctgtaaaactgatacagctgagaagaaaatgcatggaagtgtataaatgacaaacaaaactgttcataaatcttaacattattgaaattacacgaaatagcaaagaaaagcatggttttgttatcccccaagctgaccatgcaacgccaatagcaaagtaggtacccactcct

SEQ ID NO: 89877 - DNA, 257 bp, Glycine max
  Clone ID: 700905595H1
gtgactgtgacaactttcatcggcacttgtcaactttttactgatgatgatgatgataaatacatgtttgtaattgagaggagagaaaaaaaaatcctatagatactgggttgttgtttttgttatgttagagatgctagaaaggggcatattgatgtctgtgcagacaatgaatcaccctccatttcttactggtgatgcctttagaaagaggactcagactcggtgcagatggagagcaaattcaagcacagctt

SEQ ID NO: 89878 - DNA, 260 bp, Glycine max
  Clone ID: 700905596H1
gctcactgaatgcagtagccaatgatggaggatggatatatcttggaactaacaaaactatggcaaaatcaagtatcactggctacagtcagtggtccctctcaaaggatcatcttcaggtgggtgatacagtgcgctctagaaagctttccaattcatgcgatcctcaaaacatggaggtcccagaaggaaatgttgttggtttagaacgcaatgtagatcatggatttgttctagtgaggctccatggtgttcatgac

SEQ ID NO: 89879 - DNA, 255 bp, Glycine max
  Clone ID: 700905602H1
atgatcctgtggctgtggatgttgtacataatggagccacattccaggttgcaggtttgacaaacaattcttatatagcagaagcatctgaagtgcgccattgtgtacagaaatataagactcttggtaaatatgtgctacaagttgcaaagaagagactggatgagatgttatatgttggtcttactgaggagcacagaaaatctgccacaatgtttgcaaatgtggttggtgctcaagtgatatcacaactta

SEQ ID NO: 89880 - DNA, 253 bp, Glycine max
  Clone ID: 700905604H1
ggttccaacaatgatacagaggacaacaagaaaaatcatgttgtttcttctataaaagccgtccaaaccctttgtcatcccacaaattataagaaagaatgcgaggaaagccttatagctggggctggaaataccacagatccaaaagaacttatcaaaattttcttcaacatcaccattacaaaaattggtgataaactcaaagaaactaatattttgcatgaggttgaggaggacccagagccaagatggc

SEQ ID NO: 89881 - DNA, 255 bp, Glycine max
  Clone ID: 700905605H1
ggcttcttctatgttagttactgtcagtgcgaagttggcggcttctatattggttactgtctatctcaggtcagtttcggcatttaatatctcagttttggagaattcactgttgaacagaatgatgtatgatcaactttgaacaatatttgagtacacttaatggtaggaagaatcctattacttcttaataattatatgaactttactcttttgtgtgggaagttatttaacagaagttgacttgttcaaaaa

SEQ ID NO: 89882 - DNA, 252 bp, Glycine max
  Clone ID: 700905607H1
cttcgctctgattcttatctcacactgaactctcttgctaatcgagtttctcactctgaaaaaaccttcaacgatggccgctgaaacgattccgtaccagaatggcgttgttgccaactccaacgactcctccgccacggtcaagagatcgatggatagcgaccgtcgccgccgccgctggaagcagaagaagagctacaggactctgaggctccggttcctaactccgctgaagatagtgatgatgcgaaa

SEQ ID NO: 89883 - DNA, 252 bp, Glycine max
  Clone ID: 700905609H1
gcgatcagagcctctgatgcagttgttttgtatgaatctgctcccttattgtcgcttgcagataaagtttttcctgtgtagatatctaactgaaacagttggtgtgataatgccgcctagaatcagagaaatgggcatcaagtgtttgactgtgactgctctgcaacagcaccgagcccaatccattctcgagcatttggaaggagaggattggatgtctgaactggctaggcttgaggccagttgtctttc

SEQ ID NO: 89884 - DNA, 91 bp, Glycine max
  Clone ID: 700905610H1
aagaaaaaaaaaatggaaaagaaacaagattgagaattggggtttgaagaagccggtggtgtctccttgcttgttctcgatcgatcttgtg

SEQ ID NO: 89885 - DNA, 252 bp, Glycine max
  Clone ID: 700905612H1
cccatttctcatgaacgcagctctgttctctcatctcaaacccacacaacaccgtgacaccgtcgctcctgcaaggttgccgcgccgcaccgtcatctgacggtggaacctgtctcaatctggcatccttaccgtcgccgtcacggaggctgctggaacagcgaccaacggcctccctttctgaacggcgaggtaatctactgtctgtttgaggtgttaaatagcatgtgggtgtctattgatcattttcct

SEQ ID NO: 89886 - DNA, 256 bp, Glycine max
  Clone ID: 700905613H1
cttgattctgttgttatttgcatttgaagctgtttgcttggggagtacatatttgtttgctcagagacaaatgaaaaaaaaaatgtaaaacaagattgttacatgcatgtggatgtaaaaaatgctgctacatattgcttgaaattttacaataaggaaacaaaaaaaatttgaaatgcaatatgtaaaaatcaagtcttgtatacagtgagtgattattgacgaataaagcctgctaaataatttaatttttgtg

SEQ ID NO: 89887 - DNA, 254 bp, Glycine max
  Clone ID: 700905614H1
agcgtattaacccttgtgatattagtggggtgccaaagaagagcagctgggacatgattgtggatactacttctcttgtaaacaaggaatcaaggaaagctatgcagcttttacaaggtctcaaagggactcggttaatcattccaagattggtcataggggaacttgaacgtatgaagaagcagttcacaattttcagaagaatttcagaggtttctttggcattggaatggattgaagaatgtatggtgaag

SEQ ID NO: 89888 - DNA, 249 bp, Glycine max
  Clone ID: 700905615H1
ccgagaaagttcattcgcattgcccatctgtgcttgcgtatctgttgatcccgctctgattctatccaattctcacacgcgtttatcccttgttctccaaatatgggctcagtttgaagttgatgtggtcaaagtcaaaatggattcacatgtaatatgataaagacatcacctagccaactgggttttctgaaggttgcaacatgttgatggacctttccctttttgtagatcacttctacaatgaaa

SEQ ID NO: 89889 - DNA, 247 bp, Glycine max
  Clone ID: 700905616H1
cttaagagatcaatatggccaccaccactacccagcctccctctaatatctgttttttccttctgttgttgcttctagcacactttcatttgggcataagccaacttgagctgaattactactctaaaagctgcccaaaagctgaagagatcatcaaggaacaagtcacacaactatataacaagcatggaaacactgccgtttcgtgggtcagaaatctcttccacgattgcgtggttaagtcatg

SEQ ID NO: 89890 - DNA, 250 bp, Glycine max
  Clone ID: 700905617H1
tttttattttatgcttttttctccgatgtgactggcgtttgtttggtgtgtttttcgtgtgcgtcgaaccctctgcgttcgttaattttgttttgtgttttcggatcgacttgtttcgcgttcggttgcggggatcttcggtttaggtaaatgagtggtaaatgagtggtttttgagcagaagcagttaaaagagaaagggattcagcgaagatgacatcggttggtgtggcaccaacttcgggtttgag

SEQ ID NO: 89891 - DNA, 253 bp, Glycine max
  Clone ID: 700905618H1
ctctttgccattcttgtaggttctgcttcccttccgagggggtccttcaacgtcatttgagggaccctcgtcctttaatttagctattcttattcttattaattaatttagccaaagagattatatatatatttatgtataaaaccgagagggattttgccattgtttctgggtgaaaatgttgtttagaacaaagaattcataaatatcatttccaaatttcttccgccacaagttcttggaggttgtttat

SEQ ID NO: 89892 - DNA, 251 bp, Glycine max
  unsure (1)..(251): unsure at all n locations
  Clone ID: 700905620H1
tgctatctgcttcctcgtagtacttcattgagagagacatggacactgtactaagtactacgctgctactcatgttggcatgctccatcgtgcatgttcttcgttcactacaagcaagaatgagaagaaaatcaaactacaatcttccaccaggaccctctctcancaccatcattagaaactctaaacaactctataaacagccacagcagacaatggccaagcttgccaaaacctatggccccataatg

SEQ ID NO: 89893 - DNA, 251 bp, Glycine max
  Clone ID: 700905621H1
tgagtttcttgttaccattaccaaccctcttgttgtgtcactttgttgtgttaatttattccctccaatcaaaggccgatgaatttgatttcgatgagtccttgttcaatgcaaaaaacgcttccagtggcagaaaacttgcaggaagatgcaacttgttccgtgggaaatgggtttatgacccttcataccctctctatgacccttctacatgtcccttcatagatccacaattcaactgccaaaagtac

SEQ ID NO: 89894 - DNA, 252 bp, Glycine max
  Clone ID: 700905622H1
ttaattcgttaacaatttgcactcctttcaatcattaaaagatggcagatggtgaggatatacaacctcttgtttgtgataatggaactggaatggtcaaggctggatttgctggagatgatgctccaagggctgtgttccctagcattgagggtcgtccacgccacactggtgtaatggttggaatggggcaaaaggacgcatatgttggtgatgaggctcaatccaagaggggtattttaacactgaaat

SEQ ID NO: 89895 - DNA, 252 bp, Glycine max
  Clone ID: 700905623H1
gcgaggcttttgttctccctcctttccttgttcctcttccgtcctccttcgtttctggtggacgtggaccccacaccggcggcggcactcccacgttaacatacattaatcatgtctgttcaacagccgccatgtgccgccccgctgcaaaacaccacaatggtggctgttgacaaagacaaaaacagtgttcatgctttccgttgggccgttaatcacctcgacaaccccatcatcattgccgtccatgtc

SEQ ID NO: 89896 - DNA, 229 bp, Glycine max
  Clone ID: 700905624H1
tatttattagcacccctcacattaccttgtgtcaccaactaatttgactcctttaccataccattacaataattatcaaacctaaccagtaaaaatggtgaccgtggaggaaatccgcaacgctcagcgttcccatggacccgccaccatcttggccttcggcaccgccacgccgtccaactgcgtctcccaagccgattaccctgactactacttccacacaacatac

SEQ ID NO: 89897 - DNA, 248 bp, Glycine max
  Clone ID: 700905625H1
tcttcttcttctttttcatcaatcatcaccagtggttcttttccttctgagaagatcgaattgtgttttgcaaaaatgggagttccagagaaagaccctctttcccaattgagtttgcctcctggttttcggttttaccccaccgacgaggagcttctcgttcagtatctgtgccgcaaggtcgctggccaccatttctctcttccaatcattgccgaaattgacttgtacaagttcgacccatgggt

SEQ ID NO: 89898 - DNA, 246 bp, Glycine max
  Clone ID: 700905626H1
gcatcctgattgtgtgatgctggtttatccaagtggggttggtgggtttgatgtgaattggaaggagttaagtgaagctatattgggatttgataagttggactggaaagggaagcctaattcccttagcaaagagcatgtgtgttgggaagttatttataggactgctgaggctgtgaagaagcctttgacattgggggaaagattcttggttgagccatttcagaggagtggtgtttgtgggga

SEQ ID NO: 89899 - DNA, 251 bp, Glycine max
  Clone ID: 700905627H1
cagaacacaaactttattggttctgatctgaaccacacactcatccatcacatagtatcatagcctctcaataattcaattgactcattcctggaaacctgtgtggtgaatctcaaccgcacacatcatgctaccttatcatctttattaaccgttcatttcctagccagtttcacacaccccactgaactcactcactggaagccttgttgtgagtaagggaaaggcttcctgcactgagcaccaagttg

SEQ ID NO: 89900 - DNA, 253 bp, Glycine max
  Clone ID: 700905628H1
cgttagggcactcaacattttacactcttttcttcttctcgttgttgcttcggtgttgaatcatggatcagaaagtcgatttcagtgctccgcattccatgggaaccactatcatcggcgttacttacaacggcggtgtcgttctcggagccgactctcgaaccagcactggagtgtatgttgccaaccgagcatcggacaaaatcacacagctcactgataatgtttacgtgtgtcgctctggatcggctgc

SEQ ID NO: 89901 - DNA, 254 bp, Glycine max
  Clone ID: 700905629H1
attcattcattgatcaaactcccaaaacaatggcttctttcaatctctcttattcttcctcaccagccctctcacatcctcgggcgagcaaacaattcaaattattcaatgatgtgccttttgtccgaatgaattctaaatttccctcaagtgacaatgctattgggagaattaaagctaagttgatctctggagggggtgatctactttcctatccaaatggcaatggcattgtgataggtaaaaatctggtt

SEQ ID NO: 89902 - DNA, 249 bp, Glycine max
  Clone ID: 700905630H1
aggattctcaaatactcaactcattagcccttatcttgcccttattcctcttcatgattctgatcctaaaactagggagaaaactcaagagatctgaattgtctctaaacatataccgaggaccatggaaactgcctattataggaaatttacaccagcttgttacatcgacaccacaccgaaaattaagagacctggccaaaatatacggacccatgatgcatctccaacttggggagatcttcacaa

SEQ ID NO: 89903 - DNA, 248 bp, Glycine max
  Clone ID: 700905631H1
ggagctcgttggtgcaacgctgaatgcttttttttctttttgtgtgatagattttgcaagttgcgtgtgtgtgagagtgagtgagtgcagaagatgtggccattgagcagaaaagggtcttctgggttttcatcatcatccactgcagagcaagtcactgaaggaattgatggaactggtctcactgccattgtcacaggggcatccagtggtattggaactgagacttcacgtgttcttgctttgcg

SEQ ID NO: 89904 - DNA, 247 bp, Glycine max
  Clone ID: 700905633H1
tgacacaagtcatcattaactctatgcctattcactctttcctcagtttctctatccatccatctctttcatcactttcctctatctatctatatatatatatatctccctctctctattctcttttactactgttctgcaaaaaagctattttggccctgtgccaccaaagccatctcccccatttttgctcctctatctcttttttctaatcatcacaattgggtgagaaaaaaacacacacaca

SEQ ID NO: 89905 - DNA, 251 bp, Glycine max
  Clone ID: 700905637H1
ctctgggtaggtaaagatggaaggtgctagtagagtcttatgcttgtttctggcggcatttttgtggtttaatgctcaacatgcttttgtaagttgtgctttgacatttgagttgcaaagcaaaattgctaaagccaaccaagagggaccttacctaggtttaatcataccaaattcttttgaactagaccctcttcttcagaatcctggctacacagctagtgacaccatcatagacttcgctggaagga

SEQ ID NO: 89906 - DNA, 246 bp, Glycine max
  Clone ID: 700905641H1
tagttatctactcttttctgcatgtttgttctctcaacgactcctccgcgaaagagtattattcaatattttggttgggttgaatcccggggttgaagcgttgcagacatcacggctattctaagagtgtctcgctccctcattcatgtccgatctgtacgacggaggacgggtagttgcgtaactgccgttaacccttcgccgcacggtgggcgtggtgctttgccttctgaaggtggtagccct

SEQ ID NO: 89907 - DNA, 247 bp, Glycine max
  Clone ID: 700905642H1
attggttacgtacacatgccaacttggaaccatttatattggcggctcataggcaattaagtgctatgcatccaattttcaagttgttggacccccacatgaggtacaccttggagatcaatgccttggctagacagagtttgatcaatgctgatggaatcattgaaaattgctttactcctggtcgctatgccatggagattagttctgctgcctacaagaacttttggcgctttgacatggatag

SEQ ID NO: 89908 - DNA, 250 bp, Glycine max
  Clone ID: 700905644H1
atactgtttctaagcataatcaaatcaaccatggctaccctcattgctccaatcaccttttcgcctggtttagatgcagaagctcttagaaaagcgttccaaggatgggggactgatgagatgaccgttatagcaatatttgttcacacatatattcatcagaagcggcaaatcatacagatttatgaggaaatttaccaagaggacctcatcaaacgcctagagtctgagctctctggtgactttgaga

SEQ ID NO: 89909 - DNA, 248 bp, Glycine max
  Clone ID: 700905648H1
atctatctcttgtttcaatttcaacaacggttactccattttcgttttgagtttcaatcaagccatcatcatgtctaccgcatcgcaacccaaggccaagaaaacggcgtcgtccaagaagcccctctcccaccctcccttcgccgtgatgatagcagaggcgattgcgagtctgaaagagagaaccggttcgagccaatacgcgataaccaaatacatcgaagggaagcacaaggagttgcctgcaa

SEQ ID NO: 89910 - DNA, 89 bp, Glycine max
  Clone ID: 700905650H1
gggaaatcgaaggaccacgcctagccagcattctttggaattgaattgtgattcgtgaaggaagggatagagacatgagcaacgttaac

SEQ ID NO: 89911 - DNA, 246 bp, Glycine max
  Clone ID: 700905651H1
ccggagcttctctttatagcggtaaacccttgtcggattcgccgcttcctcttgtttacgctgggaacgcgagtaactcttctgtagggtatctatgtttgcaagattctctgattcctgagaaagtttcagggaaaattgttatatgtgagagaggtgggaatccgagagtggaaaagggtttggtggttaagcttgctggaggtgctggaatgatattggcgaatagtgaagcctacggagaag

SEQ ID NO: 89912 - DNA, 247 bp, Glycine max
  Clone ID: 700905652H1
aagaagatgcaggatatttatggagcttctggttactttttggagaaggattctgtgaaaaaggagaaacatttgcaatctttgaaattgactgaggtgactgtaagtgaccagcttgaaggttttcgagcatcaaaagagcatttcaaaggattgagattccccactatttcttcagttggctcaaatgcagctataattcactattttccaaaggcagaaacatgtgctgaacttgatccagaca

SEQ ID NO: 89913 - DNA, 250 bp, Glycine max
  Clone ID: 700905653H1
cggattcattgcatcaccgtcaccaccactttcatcatcataaaacatttttcatataaataaaatatattcattcattcacacatcgtaataatacttatctatcattctctctctttcaattttagacagaagactaaaagagtgaagagaacaaacagagcaatggaaggaggaggagctgctccgccggccgacaccgtgatgtccgacgcggcgcctccgccgcagcaagcgatggctatgggga

SEQ ID NO: 89914 - DNA, 246 bp, Glycine max
  Clone ID: 700905658H1
atccttcagaacaaggtagacttgattcaagaaaatgtcgcaatcaatcagcatgaggcaatttcaaagtttatacaaggaactgttgctgatggtgcaccagtagtacctatttcagcacagttgaagtataatattgatgttgtgtgcgaatatattgtgaagaagatcccaatccctgaaaggaactttgtttctccacctaacatgattgttattcggtcatttgatgtcaataaacctggt

SEQ ID NO: 89915 - DNA, 128 bp, Glycine max
  Clone ID: 700905659H1
ctatgttccgttttttctctgccgttatggtcaatcctaaacctcacaaactcttctcttccctctctatcttcccttccgccaccgctccccgcgactttcaatccctcaaattccacacaacatac

SEQ ID NO: 89916 - DNA, 251 bp, Glycine max
  Clone ID: 700905661H1
ccctcgagcgaatcggctcgagcgccgctgatgaggctgcacttcgtcgtgcctgtgctgcgaaggttcacatgtgcaataagctagctagtaggcatgtgagggttggtcttgcaagtccaagtgatgtgccacggtgtgacatatgtgagaatgcaccagctttcttctattgcgagacagatggaagttccctttgtttgcagtgtgatatgattgttcatgttggtggtaaaagaacgcatggaaga

SEQ ID NO: 89917 - DNA, 246 bp, Glycine max
  unsure (1)..(246): unsure at all n locations
  Clone ID: 700905662H1
acgaagtcgantttcctcactgctcaatccgagcaagagcgccaaagaaggtcaaatatcaacttctgggatgtttttagatccaaagaaatcagactggcattcctcgtcggtgccggacttctggcttttcagcagttcacgggtattaacacagtcatgtactacagcccgacaattgtccaaatggcagggttccatgctaatgaattggctcttcttctatcccttatagttgccggcatg

SEQ ID NO: 89918 - DNA, 245 bp, Glycine max
  Clone ID: 700905663H1
ctccagcactttcttctacttcttcatcatcattgtcaccacaactcacaatggagatcaagagtagagagaggatacaagtgtcaattgaaaaggtgaggagagacagcacagttgaagttgaagatgaagaagaggaggatgaaagtgtggttggtggtgagggtggtcttgcagaagatgagaagaagaaaggtggtggagggagtgggagaagagggtcaagtggagtttctccaccttct

SEQ ID NO: 89919 - DNA, 249 bp, Glycine max
  Clone ID: 700905664H1
tactcgagcgaattcggctcgagttaagctagagcttcatagttacttcttcttttctcagcttccttctctcccttcagacaaagggacaaaaaatcagtgtgtgagagagagagagagaaattccaaaaccatgtcccacagtcatctaagtttcgcctttgggattctaggtaacattgcctccttcgtgtgctttctggcaccactaccaacattttatagagtttgtaagaagaaatcaaccga

SEQ ID NO: 89920 - DNA, 158 bp, Glycine max
  Clone ID: 700905666H1
attttcttcaaaaacaatggtaggcgaggtggtgaagaaggaagactctctcaacctgagagtcactaacaagagtcatgttcaacctgaggagaaaattggaaggaacgagtaccagctggtcacttttgatcttccctacttggccttctactaga

SEQ ID NO: 89921 - DNA, 246 bp, Glycine max
  Clone ID: 700905667H1
ataaaaggttagagaatgttgttgtaatttggtctagttaacttggtggctcgctgacgtcacgtggttaagttgagaaacaacaacagagacacggtggtgtactcacggaatgaattggaatcggatcgtgtcgtagccaccgctcctacctggcgccgtctttcactttctgcttctcccatctcccactaaacaaccatggacctggatcctcgccaatacgaaaaccttgctgtaaatgat

SEQ ID NO: 89922 - DNA, 245 bp, Glycine max
  Clone ID: 700905668H1
gaagacttcattttcttctgcatttctccgttaaagaaaaagcaagaacaaaattaaatttactattttgtgtgtgacactgtgtcttatttatgctctttctgtattttctttctacatctatattctaaaccttccttttcctttctgtctgctactgcgttttcatttattgatgtccttcttttgttttatttgccaagatgattttctgattggtttttgatgttacaaggaaatctggg

SEQ ID NO: 89923 - DNA, 245 bp, Glycine max
  Clone ID: 700905670H1
ggtcgttattgcaggaacttaagagtcttgtttttagaggaaagctcacttgttgagaatgatggtgactggctccatgagcttgctttgaataatacagttcttgagacactgaatttttacttgactgatattgccaacgtcagaatccaggaccttgaacttatagccagaaattgccccaacttaaactctgtgaaaattactgattgtgaagtattagatctggtgaacttctttcgata

SEQ ID NO: 89924 - DNA, 245 bp, Glycine max
  Clone ID: 700905671H1
taagaaggcagctgcagctgctgttgctgctaagcttgctgcctctacatcctctgcccttatgcttacatctgttctttcttcccttgttgcagaagaagctgcctccatgaatggtagcttaaactctactgggtttacttcagggttacctgttttccgtccagagaaaagacaaaaacttgaaaaacaaatgcatgcttctgagtttaacagtactgatatggggagctcttcttttctgg

SEQ ID NO: 89925 - DNA, 243 bp, Glycine max
  Clone ID: 700905673H1
ggactcactgtgtcgtggaaccttttgtaattgcaacacataggcaacttagttccatgcatccaatttatagattattacatcctcatttgagatataccatgcagattaattcccttgcacgtgaggcacttattagtgcaaatggggtcattgaaatttcattccttactaataaatattcaatggaattaagctctgtggcatacgatcaactttggcaatttgattcgcaagcacttc

SEQ ID NO: 89926 - DNA, 246 bp, Glycine max
  Clone ID: 700905674H1
gagctttagttcatctaagttttgaaagttttgtgcttgtttccatttgaagtttctgtggcagcaggttagctgtgtgaagcagctcttcatcaaactctcaaatcacaactaaacaaacaaatcaaatacaccaccaagtatcagatcattggggttgtatgccctgcattactctcttttttattgcgtttataacttattcttttgtgcattgtgaatttgtgggttttaagattctcctct

SEQ ID NO: 89927 - DNA, 245 bp, Glycine max
  Clone ID: 700905675H1
gtccaaaacggtatcgtattttaaataaaacgtaataaatgaggtgtaagaaacacttaccggacctcaccagcaccatcggcgtgtgcgcttcgtgcctccgcgaacgcctccagcctctcctcgcagcccaggcccaagcccaggcccaatcagaacgttccaccaccaattccaatccggataataatcatcgtcgaagaaagcccaagcccaagcccgaagaaaaccctccgccgctcaat

SEQ ID NO: 89928 - DNA, 249 bp, Glycine max
  Clone ID: 700905677H1
tttcttcctcagtagtgtcatttacgcttctcttctctgcagcaactatgcctaaccctaaggtcttcttcgacatgaccatcggcggtcaatctgctggccgcatcgtgatggagctctacgccgacgtcactccccgcaccgccgagaacttccgcgcgctttgcaccggcgagaagggcgtagggcggagcggcaagcccctccactacaagggctcgtccttccaccgcgtgatcccgagtttca

SEQ ID NO: 89929 - DNA, 241 bp, Glycine max
  Clone ID: 700905679H1
attattgtaaactaatagggatgaaaaaatcttaacttgtacccctttattggcagctgaagtatccagcaccaggggctccacacttcgtacggcttctgaaggagctactcttaggatcagggtttagccatgtggatgaagataagaaacgtgggcttgaccatggtgcatgggtgccactcttgtggatgtacccagaggcagacatcccagtgtgtcaactctctatttcatcaaa

SEQ ID NO: 89930 - DNA, 242 bp, Glycine max
  Clone ID: 700905681H1
gcggattcatcttcggtcattttattttgtataataaaagaaagataataaagagaataatcatattaaatattaaatagaaaaaatggcccgatcatttatcaaaggccaatcttcggtagaagagaaggttcctttggaaaacttatttctatttcagtataccgggtctctttctttcatttcaaaaaatttatagaatttcgattttgaaatgaaagaaaagtgtggggataaatata

SEQ ID NO: 89931 - DNA, 243 bp, Glycine max
  Clone ID: 700905682H1
gtaagttcgaattgcggaagcaccattcacgataaatcatgttctagtttttatcgaggaataaaggcaagctctatttggagtcaagtgaaacatctatcttcctgtccaagttctttgaataaaagtctgaatgtgtcatctctgcactacaatatttgtgattctgaccaagttggttctatttatttgatggccatcttgcacgtcctgatcttattgtgttcaagtgacagacaaatc

SEQ ID NO: 89932 - DNA, 240 bp, Glycine max
  Clone ID: 700905684H1
aaacaaacaaacaaacaaaatgtcttctccaagcaagcggcgagaaatggacttgatgaaactgatgatgagtgactacaaggtggagatgattaatgatggaatgcaagagttttatgtgcacttccatggacccaatgagagtccttatcatggaggtgtatggaaagtaagagttgagctgccagatgcttatccttataaatctccttccataggctttatcaataagatctatca

SEQ ID NO: 89933 - DNA, 240 bp, Glycine max
  Clone ID: 700905685H1
taagaactctactcagtagagagcaccctcatatggcagagaaatatgaacgctttctgcttgaatcttacattgaagacaataagagagttaaatggtgccccagcacacctcattgtgggaatgcaatacgggtcgaggatgatgaactgtgtgaggtagaatgttcatgtggtgtacaattttgttttagttgtttgtcagaagcacactccccttgttcatgtctgatgtgggagc

SEQ ID NO: 89934 - DNA, 241 bp, Glycine max
  Clone ID: 700905686H1
aagaaaactcaagctcccagattctgttccaatgcctcccgtaccactttcccccatcaaagttgggcacattgatgatgtccaagagctaagaaaaaccaagccaaggacaattcctcaaagatttgtacgagacttgatagaaagaccaacactcactacacctcttcccccaccacatagtgcactgccagtcattgatttctctaagcttagcaaagggaacaaagaggaagtcctc

SEQ ID NO: 89935 - DNA, 175 bp, Glycine max
  Clone ID: 700905687H1
tgacgacatagcgtatggtcatgaagagtttttcttttcggtttctccattgggtttgggtagatagaaatttttagtttggtcctgatcacaggaatttattatactgtattgttttacagtccaaagcagtccggaatcgtcccaatgcaatgcttacagatttattaccgct

SEQ ID NO: 89936 - DNA, 240 bp, Glycine max
  Clone ID: 700905689H1
gcttgaggacttggttttagagctccaaaccttcagatccacctcattcgtctccagatcttccttccttgataacgttttcgggttcgagaaggcacttgtttgtttgtcgtacgaaatggagactaaaccgagttcggtgatggttacgctcagttacggcgcgttgacgtgcgccgcggaagttctcgcgactttgctagcttctgctgtcgtcaaagccacgcttttggccccgga

SEQ ID NO: 89937 - DNA, 237 bp, Glycine max
  Clone ID: 700905691H1
gtcccagcatattgaaaatgatggggtttctggggaagaatctgaagtggcagatgtttcaattgataaggatgttgataagattgggagtgagggtacttctggagctggccaaactccagtggggaatgtactaaagaaattctccaagactcgagcttcaatccctgagtggcagtattccacaagaaaaatagataatgatgaaaagttccttgttagtttgatgagagaaaa

SEQ ID NO: 89938 - DNA, 244 bp, Glycine max
  Clone ID: 700905692H1
atcatcatcattcattagctgggcggtttgaaaaggctaaattctaataacaccaacgtcttcatcttgtaagctccgtctcttgacaaaatcaacgtcccatttatgcaagctttgattaaccattttcattccctttttccttcgcactactccctcattctgtgccatgtcttcctctctcgttcttccttccactcccttcttcgccaatggaacaagaaccctccctctcactcgatct

SEQ ID NO: 89939 - DNA, 260 bp, Glycine max
  Clone ID: 700905693H1
tcagaattctgctcgttgctctacgcactatagtctttgttttcatttactaccatatttagttatcagcaatggacttctactttggaaactctcctccttatcccaataattatgctcataattctcttaatatggctctatcttcccctgagattgcactatccgattatctcatgctcgatgactatgttgatcatcaagattctcgatcatcacaaagcaccgagtcatctgaaaaagcaaccttcaatgatgcc

SEQ ID NO: 89940 - DNA, 237 bp, Glycine max
  Clone ID: 700905694H1
gcacgtatactttgctctgctccttactccaaagtgcccctctctcgcgcttcgtctttcaccaccgtacaatttttccgcagcttcaacgcaacctgatcgagacaattccagcattcactccgctagcgtctttcactcataaaatttggaacgtttcgtgaaactcccaaaccagaagccgaagtttccaagtgaaaatggacggtacgtttgacgatgaagctgaaccggccg

SEQ ID NO: 89941 - DNA, 238 bp, Glycine max
  Clone ID: 700905695H1
cccaaattcattttaatcctaattctgcacttcttgatcattcgatttttctcctcaagatgcagatattcgtaaaaactttgaccggcaagaccatcacccttgaggtggaatcctccgacaccattgacaacgtaaaagctaagattcaagacaaggaagggatcccacctgaccagcagagacttatctttgcgggtaaacaacttgaggatggtcgcacccttgccgattacaa

SEQ ID NO: 89942 - DNA, 231 bp, Glycine max
  Clone ID: 700905696H1
ctcacataacactgtttatcgatgatgctctgaactctttatctatatatgcctctctgatgccgatgggtgcctccagttttccggcaagcttcaaacttcccttcgccggccccgattttgatcacttttccggtatgaatcgtttgcgacaccccctttgttgatttagaaatgctagatctattcgtcgcatcacacgttcgatccaaaacctggttccacaagagg

SEQ ID NO: 89943 - DNA, 265 bp, Glycine max
  Clone ID: 700905701H1
ccacaaccactcttaatttctctgtgcattgctcatttacacacgtgtccaacctttcactttcagctttatttgaatccctctctctcctttccaaatggccagcgttgagctttcttaagcttggcacgagactttgttaaatgcaattagcaatctcccaggttgcacatcaaacaccaacaacagttccagaaaatgaaacaaccgcggtaatcaagacccaggaaacaaccccggaaccagtaccagccactgaggctcc

SEQ ID NO: 89944 - DNA, 262 bp, Glycine max
  Clone ID: 700905704H1
atgagttgagagtattgtgttgttcacctgctaacgtaacaagtaagctccagcactgtatttcattatctttcctttgatccatggaagcctgtgatctcatgtgatagttggtgtgctgcataggcaacgctttctaacgtgtcttctaaggtggtatcactgctccacggttgccgaatccagcctcttgcttctttctccttccaagatatcctttgattcaactttggatcttcacctctgatttcctttcatcgtt

SEQ ID NO: 89945 - DNA, 260 bp, Glycine max
  Clone ID: 700905711H1
acaaccacaacaaagggaccaaaaaagtatccactttcccttcttcttcttccatttgggttttctcaaaagtgaaaagcaaattccgtgacttccacaatcaccactcgcatcaaactcttgagtgatagactttgaatgaaatcttgtttttcattaacgagattcaattgaagtgaagtgattattcactggaaaacttatttttcatagtattggaggtacaactgaagctgttagatttgttttaactacacgag

SEQ ID NO: 89946 - DNA, 261 bp, Glycine max
  Clone ID: 700905712H1
cagcaacaagtgcactttctttgtccagtcaagctgctgctggtacagtaacatccccaaggcaagcggctgttagccaaagcaagaggcacaggctgataaatgagatggaaaccgagtcataccctctcacagaggtcactgcaacgtggatcagcttctagtggtgaaaacaacagaattaaagtccatttgccacagagggaatcaagaactggaagcggtgggggcagcagcaccagggagcaacagcaggaagat

SEQ ID NO: 89947 - DNA, 259 bp, Glycine max
  Clone ID: 700905713H1
tagttaagaccgctgggcttctaggtgatggatttggttccacgcctgaaatgtgtaagaagaacctgatatgggtggtgactaagatgcaggttgtggttgataaatatcctacatggggtgatgttgttcaagtagacacgtgggtttctgcatcagggaagaatggtatgcgtcgtgattggattgtgcgtgacgccaaaactggtgaaatcttgacaagagcctccagtgtttgggtcatgatgaataaagtgac

SEQ ID NO: 89948 - DNA, 254 bp, Glycine max
  Clone ID: 700905715H1
agctagaagcaataagatgacaatgaaagtgcttgttttgtttgttgctacagttttggtagcatatgaatgccatggctcagactaccagaagttccctctccaaatgaaaactgggtttggtgggcaatacagcaatgaggtggcatgtgccagttggaggcttggcgtggaagcaaacaacgtagtcaagtggcaaactgttcctgcagcttgcggagagtacatagctgactacgttctaggagaccaat

SEQ ID NO: 89949 - DNA, 260 bp, Glycine max
  Clone ID: 700905717H1
aggtaggttgtgtaagaactgtggggtgagggaaccagtggtgttgttgttgccatgcaggcatctttgcctttgcacaatgtgtgggaccaccgataaggaattgccctatttgtgactctggcatggatgctagtgtgcatgttaatctctcttagtacaacttttgtttttttttacataggtttttattgtagagtttacaacaacagaaactagaaagaaaaaaaacatcttgtcgaaaagacagatagaagaaa

SEQ ID NO: 89950 - DNA, 259 bp, Glycine max
  Clone ID: 700905718H1
aagatggctggtattaagagaagattatgtagtgattcagatattcatgctcttcacaaagaattggacagcagttcatgtcctatctgcatggaccatccacataatgctgttctactcctttgcagctctcatgacaacggctgcagatcttacatttgtgatacaagttatagacattcaaattgcctggaccgattcaaaaaaatgagggccaattctaaggagaaccacaatttacccagttctttagtagaca

SEQ ID NO: 89951 - DNA, 266 bp, Glycine max
  Clone ID: 700905719H1
cacgtgtgcaagattgcctaccagctccttccaatgtagtggtgcttaccatctgaaaattttaatgaggttgtcttagatgaaaccaaagatgtcttggttgagttttatgcaccctggtgtggacattgcaaaagtcttgctcctacttacgagaaagttgccacagcatttaaattggaggaagatgtagtaattgcaaatctggatgctgataaatataaggatctggctgaaaagtatgatgtgagtggacttcctacctt

SEQ ID NO: 89952 - DNA, 260 bp, Glycine max
  Clone ID: 700905721H1
agtttcttttcgtgaaacaaaagaccacaacagattaggttttgtgatgtcgggcatggagaggcttcagaggatgttcgcaggtgcaggtggagcgctgggccatcccccaccggattcccccaccctcgattcctccgagcaggtctacatctcctccctcgcccttctcacaatgctcccacacggaagagctggggtacccatggaagtgatgggtctgatgttgggggagctcgtggatgagtacaccgttcgcg

SEQ ID NO: 89953 - DNA, 252 bp, Glycine max
  Clone ID: 700905722H1
ctccgccttggccaaatccctcagctcttgttgtttgattgagatgacgatggcgttgttagcgggtcagagctccatttccgcgcttccatttgttaacccaacttccttgagcttcaaacctctcgcctttaccaaatccctagctctcccttcagcacagaggccaacttcgctgaggctgaaatgcaagatggagaccaacggcaacattctgcaggggaacactcgcacggtgacgacgctgatggg

SEQ ID NO: 89954 - DNA, 258 bp, Glycine max
  Clone ID: 700905723H1
aggagacagttgagagaatcgatcaggttatgaagagtgttctcatcaccttggatccgagaattgatgactatgttccaattctaagtccgtttttctcaaagcaaagaaagaaagccttggaggttcgtagagaacaagttgagttcttagttccaattatagaacaaagaagaagagcaatccaaaacccgggttcagatcacaccgccacaacgttttcctacctagacacactttttgatctcaaagttgaag

SEQ ID NO: 89955 - DNA, 159 bp, Glycine max
  Clone ID: 700905063H1
cattgttggagggagtttcagttattccctcttcattcttcgttcctctttggttgctccaagaagtgggcatgatcatggactccaagaccgagatcatgatcatggactccaagaccgggttcctcatcatgtcattgacttaggttcacattcaca

SEQ ID NO: 89956 - DNA, 252 bp, Glycine max
  Clone ID: 700905064H1
cggaaaaaacacttccctcggcaccgtttccgcggaaccggtccaagtttcagtcctaaagccgcatttggacacacgaaccccaacacgaatttttcccatcgcaattctccccctttcagaagcttccaaacacgccgttagctttaaaaaggaaaaaaaggaatatagcacgttggagcatcatgtcttgttcgttacagtccctcgcttcacgtattaagaagagcccaaagcgaattcgaacttaga

SEQ ID NO: 89957 - DNA, 206 bp, Glycine max
  Clone ID: 700905066H1
ctacaagagaatttgttaaaattggatactctaaatggaagaaccggtgcttgttctcagccgatgtctcgagccaaagagacactttcaagagtagctgtgacaagaacttcgtcagagaaatattcggatttttgcatgccaacctccgatttgtctaaggagcattgtaaatcatgcgatatttgcagacgatcagagtttat

SEQ ID NO: 89958 - DNA, 120 bp, Glycine max
  Clone ID: 700905067H1
cacaaaccctaacaccaaaaccagaagcgaaatcgcaatcgcaatccagcgaatatgaaggtcgtcgctgcatacttgctcgcagtgttgggagggaatccttccccttctgccgatgac

SEQ ID NO: 89959 - DNA, 185 bp, Glycine max
  Clone ID: 700905068H1
cctttcttctccttctcgcactgccatttgaaacccctgacccgaatcgtttcctttctcctcatcctctgcctcagtctcccaggatccaatataaatggaaatggaagcttcaaaatttatggctacaacgaactgaagcctctatcagacttagcttgcccgggttagtgggagaatttggg

SEQ ID NO: 89960 - DNA, 108 bp, Glycine max
  Clone ID: 700905069H1
ctttttgggtttctgagaagtgcgtgtgttgatggggggtcaaaattctaaggaggaaagtcggaggcagagttcatctgtcaggtcttcttcttcttcttggagtgc

SEQ ID NO: 89961 - DNA, 65 bp, Glycine max
  Clone ID: 700905071H1
gttctttgactggtatagaatattgggatggatgggcaatggtctctattcctccctcatcatct

SEQ ID NO: 89962 - DNA, 251 bp, Glycine max
  Clone ID: 700905072H1
gcctttttgggcacccagatttccaccattctgagtaacttcacacactatataacagaaaatgagggggggcttatggcaactcgggcaatcaatcactcgccgtcttgcccagggtgataagaaggctgttgctcgtaggtattttgcctcagatgctgagctgaaaaagacagtcgtttatgacttccatgttgctaatggagggaagatggtgccatttgctggatggagcatgccaattcaatata

SEQ ID NO: 89963 - DNA, 203 bp, Glycine max
  Clone ID: 700905073H1
caagcacatgcttgctaaacaaacagggcttaccaggagccaggtttctaattggttcattaatgctagagttcggctttggaagccaatggtggaggaaatgtacttggaggagatgaaagagcatgaactaaatggttctgaggagaaatcaagcaagagtggtgaagatcctgctacaaaaaccacaagtccacaagaga

SEQ ID NO: 89964 - DNA, 249 bp, Glycine max
  Clone ID: 700905074H1
ttaatatttgcttcattccttcaccgccgcactatcgtttccgagaaccatcactttttctcgctgctcttcaaagcaatcgcaacgcgcgttttgcttctcttttcatcgcagatcctctgcgtcgccaccagattcactcacgtttcgtgattcgaacgcggcgtcgtttagactcaagcttgcgggagaagagaaaaccctaatcagacatggggaagaagaagccgacggcgagggacgaagaga

SEQ ID NO: 89965 - DNA, 251 bp, Glycine max
  Clone ID: 700905075H1
agaggattcgctccaacccctatcgagtaaggtattatctgtcaatttacattcgaaagggttaggctattgaattttaaataattacagataaaataatcgatagctttgattttaaaaattaatcataatcatcggttaggttgcaacataatacttaattcgcttaattttttaactgcgcctcagagtattcataacatattctattaaattaataagctggtgatgtaattaatattaatatgtag

SEQ ID NO: 89966 - DNA, 249 bp, Glycine max
  Clone ID: 700905076H1
actccctctacctgagaaggaggatccctgtgctagctcgatcaaagatcaaagatggaggagcggactcgcagcattctgattttgatgaccttgctttccatctccattgctggcccgaatgcaggtggcttgcagcatcataagggtaggcatggtaagcatggtcgtcatatgtctgctcgtaatgtgacctacgacggtaagtcactgttcattaacggaaggcgcgagatccttttttccggc

SEQ ID NO: 89967 - DNA, 248 bp, Glycine max
  Clone ID: 700905077H1
cgagaacagaaatctcgtgtggaacaaaagggtaaaagctcgtttgattctgatttccagtacgaatacgaaccgtgaaagcgtggcctatcgatcctttagtccttcggaatttgaagctagaggtgtcagaaaagttaccacagggataactggcttgtggcagccaagcgttcatagcgacgttgctttttgatccttcgatgtcggctcttcctatcattgtgaagcagaattcaccaagtgtt

SEQ ID NO: 89968 - DNA, 250 bp, Glycine max
  Clone ID: 700905078H1
aggagataaaaaaatcttaaagaatatcgcatgccttgaagcatgtaaacaacttcataagattggagctttgtcagataatcttgttcctgatattgtcatggaagaagcagaggtggaggaattagggaatgaaccttatgatgaaaaccaaccaacttttgtcccatttggattggtaaattctgtgtcaaataatagtcaaacggtctatcattgttatttcatggaattcaataacaaatttagc

SEQ ID NO: 89969 - DNA, 249 bp, Glycine max
  Clone ID: 700905079H1
cttttccctcgttgaaatgaaaatgggttcttctttgtggactttgtgtctaattttggcttcactagcctcttctgcattctgtgcctttccacggaggccagtggatgttccattcggcagaaactacgttcccacttgggcttttgatcacatcaaatacttcaatggaggttctgagattcaacttcatcttgacaagtacactggtactggcttccagtccaaagggtcatacttgtttggtca

SEQ ID NO: 89970 - DNA, 113 bp, Glycine max
  Clone ID: 700905082H1
ctctacttttctagaacctcaagcaccttatactcagtgaaatatcacttttgactaccttgacggacagtgtttgacattttgatattaatattactggtgtctctaatttt

SEQ ID NO: 89971 - DNA, 254 bp, Glycine max
  Clone ID: 700905084H1
cacctcccaactcgccctcgactcacatccttgtccgattccgcgaacgagtcgagtgaatcgggttggtaagatctattctgtttcttcgtcatggcaaccggacaactattctcgcgtactacacaggctttgttttacaactacaagcaacttcccatccagcggatgcttgattttgacttcctttgcggcagggaaacaccatcagttgctggaataattaaccctggttctgaggggattcaaaaact

SEQ ID NO: 89972 - DNA, 255 bp, Glycine max
  Clone ID: 700905085H1
attaaataaagctaaggagaaatattgagaagcaggaagaagcaagttatggcgacgaagcagcttccgcagatcgccattctgggagctggtatctttgtgaagactcagtaccttccgagactctccgagatctctcatcttttcattctgaaatccatttggagccgcactcaggaatcagctacagctgccgtagacatagctcgtaagcattttccccaagtagagactaagtggggagataacggtttt

SEQ ID NO: 89973 - DNA, 78 bp, Glycine max
  Clone ID: 700905086H1
tcaggctgcaacccacttccaccagagatatggcttttgcccaagtacgcccccattcatccagggaaaatgttatgc

SEQ ID NO: 89974 - DNA, 78 bp, Glycine max
  Clone ID: 700905087H1
cttcttttctctccgtgggttgaacttgaagaacctctgaaaatccgttctttctttcatcgatcactctctctctct

SEQ ID NO: 89975 - DNA, 241 bp, Glycine max
  Clone ID: 700905089H1
caaaccatggaagttgaggcaaagaagatgagaagggaagtagctgctatggagaaggaggtagctgctatgcgtgtggagaaagaacacgagaacagagcaaagcggttcagcaatataaagggccctgtaaacattgctcagcaacagctaatttctggaagaaatatgacacggggtggattaacacgcagcacccaatgacagttagtctatgacagtggcgcttgggagtagtaat

SEQ ID NO: 89976 - DNA, 245 bp, Glycine max
  Clone ID: 700905090H1
tgttggatgagtttttgaaacctaggattgccgatttcgggcttgctaagcttgtccaagccaacgttggcaaggattcctccactcgtgtcattgccggaacccacggctacattgctcctgaatatggctacacatacaaggtgaacgagaagagtgatgtgtacagctttggggtggtgttgatggagttagtaactgggaaaaggccaattgaaccggagtttggggaaaataaggacata

SEQ ID NO: 89977 - DNA, 246 bp, Glycine max
  Clone ID: 700905092H1
gagcaagatgtgctggatccacctgaagattgttttcgcataaggttgatcattactctgcttgaaacttgtgggcattactttgatcgtggctcttctaagaggaaacttgatcgattcctaatacacttccagaggtatattttaagcaaaggggcactgcctctggacatcgaatttgacttacaggatctgtttgtggacttgcgtcccaatatggttcgtcacaattctattgaggaagtg

SEQ ID NO: 89978 - DNA, 245 bp, Glycine max
  Clone ID: 700905093H1
cttgtctgttcttatcttcatcctacgccaatagcccaaaaccttgttctctttttgtggttcatttctctcttccagatgccacttgccgttcttcaccctcacgattttctcaggaaaaacccatctaaccagtaccagaccataatccctcactctcccaacatgaatcctaataagtctcatcggacttcccgaaaccgtaagaagcggcccgatccaagcccacaaggcgttgtcagccc

SEQ ID NO: 89979 - DNA, 75 bp, Glycine max
  Clone ID: 700905095H1
aacactcattaattgcaagaatggcacttcgttgcttggtgatgtccctttctgttctcttcactcttggtcttg

SEQ ID NO: 89980 - DNA, 189 bp, Glycine max
  Clone ID: 700905096H1
cctgtttcttgcactcatagcattgtcagtaggatgatgatcaatgaggagcttcatgcaagctgggaccagccaactgggtgcattcttttccaagatgttgaacactctaggctgcaggccttggcattccagttgacagagaaattatctatccttgcagagagtaatgaaagagcaacagaggca

SEQ ID NO: 89981 - DNA, 257 bp, Glycine max
  Clone ID: 700905105H1
cttggaaagagaaagacaacaaacatgcttgcattctatataattgtcatttacagctgaccacgactttgagcgaggagttggtgtttttagcttggctgataaacccagcacatgaaaaagaagcttgaaaattttgcattatggttggttgagtgagggctggtttttttagatatgtaaattttactgacacacgttgatattgagatgtacagacgaaattaacttataccactacaaagattgtaattacc

SEQ ID NO: 89982 - DNA, 267 bp, Glycine max
  Clone ID: 700905107H1
gtgccctccctctttctagctatttccctctcttaacacaattaacaaagatatatcatatcatatcaactccaaatgatgaaaaatattgggttgtttcttcttgtggtggtggctacttttgtggtggcagccacagctggtagcttttaccaagactttgaaataacatggggtggtgagcgtgccaaaatctatgaaaatggaaatcttctcaccctctccctagacagagcctctggctctggctttcgttccaaaaaagaa

SEQ ID NO: 89983 - DNA, 270 bp, Glycine max
  Clone ID: 700905108H1
tagaaacataaaaaactaaattatttttttaaaatataaatgaccaaacttaagttcagctgaaattttatgttgatactgttggagtattagttgatgcctgtagaaaacaaaatctagctctgttgagatcctatgagagaggcataatatatatagccacataggatttccaataattttccaaaggaatgtgcgtgaaacaataaagttttgacttctgcaaataggatatgattattgttgcagtgtgggcaggatgacattttg

SEQ ID NO: 89984 - DNA, 267 bp, Glycine max
  Clone ID: 700905109H1
ttcatgatcaagacactgcgaagatctgaagtcaaggtccttctaagaatgcttccagactatcatcatcatgtgaagtcatatgaaaatacacttatcacaaaattttttggtctgcacaggattaaaccttcaagtggtcaaaagtttcgctttgttgtaatgggaaatatgttctgcacagacttaaggatccatcggaggtttgatttaaaaggttcttcccttggaagatcatcagacaagatagaaattgatgagagtact

SEQ ID NO: 89985 - DNA, 269 bp, Glycine max
  Clone ID: 700905110H1
aactcgaaagcgcgtaatattaataatcgtaacaaacaagagagagaacagaactactactgtttctttttttgcctttgtttctctgcccctttgtgcagcgtctcacacaccaatggaagaaccaagtggttgcaacaagagcgctccaaaaggaaaaaaggatgacctttaccatgtacttcacaaggtcccttatggagatagcccttatgtcagagctaagcatgcccagctggtagaaaaggacccggaagctgcaattgtat

SEQ ID NO: 89986 - DNA, 268 bp, Glycine max
  Clone ID: 700905111H1
ggatagggttaaggccatggagcgcatcatctgcgccaagtacaagctaggtcgcaagatcggaagcggatccttcggcgaaatctaccttgcgacgaatattgataccttcgagatcgtcgccgtcaagatcgagaacggtaaaacgaagcatccacaattgctttacgaggccaagctctacaatattcttcaaggaggaagtggcatcccgaacataaaatggtgcggcgtagacggggaggatactgtgcttgttatggacttg

SEQ ID NO: 89987 - DNA, 269 bp, Glycine max
  Clone ID: 700905114H1
aatatccattgcacctttctctttctccgatggctaatccctcactcttgttcttcagtctcctcctattatccgccaccgtagccgccgccgaacggatcgacgatgaagacgaccttctgatccgtcaagtggtgccggatgcggaggaccaccacctgctcaacgcggagcaccacttctccgccttcaagacaaagttcggcaagacctacgccacgcaggaggagcacgaccaccgcttccgtatcttcaagaacaacttgctc

SEQ ID NO: 89988 - DNA, 261 bp, Glycine max
  Clone ID: 700905116H1
tgaagttctgttggtgagtgtgagtgagtgtatcaatcggccacacagaaatgggcagtgcttctctgattccagtttcctggttgccctggcggccactttctcctttcaagggaacggtgaaaatcttggtcgcaaaaccatggctgaagaagattcagcaagcaagacccctcatttccgtggttaacaaggctgcctctctatcttcccccgtgacagcacccagcgtcggcgttcggtttcggctggacaatttgg

SEQ ID NO: 89989 - DNA, 271 bp, Glycine max
  Clone ID: 700905117H1
ccaccttcttctcatcacatgagtttaaaccttgagctaaatttgatgtgtgaatcaccgaggaaaaaagaagaaggttatggttatgaaatgaatgagaaaaagagttctggttcttcccctgggggtttgagtgaacgtgaggatctgtgtaaaaaaagattcagatggtaaaattctttctccctcgtggttgtcatcatctgaagatgattacaaagagatggttgcaacagtttgcatgcgctgccacatgttggtcatgctatgc

SEQ ID NO: 89990 - DNA, 269 bp, Glycine max
  Clone ID: 700905119H1
gaaaactcttgagactactcctgtcatgtcgggtctcaaagaaggaatggacagattgaaagctagattatcaaaatactctcctggattttctctgtcaaatataaaagatcgtgaatacaagcaagatgaaagtcgccaaacacctttagaggaaaaactgtttagtttaactccagatagtaacgtgcataaaggcttggttgatagcaatgatcatggaattcagtcatttaaaaatatttgcaaatcaagtcaaaatgaagaga

SEQ ID NO: 89991 - DNA, 250 bp, Glycine max
  Clone ID: 700905120H1
gaggttaccgcctgtgaaaccaaggtgattcctggtgaatatggtttcgttgcccagcttaatgagggtcgtcacctcaagaagagaccaactgagttccgagttgacaaggtccttcaaccctttgatgaaaacaaattcaactttaccaaagttgggcaagaagaggtcctcttccaatttgaagctagcgaggatggacaagtccagttctttccaaatgctccagttgatgttgacaattctccca

SEQ ID NO: 89992 - DNA, 267 bp, Glycine max
  Clone ID: 700905121H1
attcttccccctccacccacccagcatatctctctattcctatttattagcacccctcacattaccttgtgtcaccaactactttgactcctttaccataccattacaataattatcaaacctaaccagtaaaaatggtgaccgtggaggaaatccgcaacgctcagcgttcccatggacccgccaccatcttggccttcggcaccgccacgccgtccaactgcgtctcccaagccgattaccctgactactacttccgcattacca

SEQ ID NO: 89993 - DNA, 266 bp, Glycine max
  Clone ID: 700905122H1
gcttttcatggctctgcatgttgtttccgttcccaccttcttcacttttcttcttccaccgcttcatctccagcattccttgcttcgaggaggttccaatcatgcccttcaacaagaaaatctctcaagttgaattgcagttcaagtggcaataatggtgaccaagattaccttctggatgcttcagtttctgttggagatggattctctttcagtggagggaagtattcagatggccctagtccaagtgatgaatggtttaagca

SEQ ID NO: 89994 - DNA, 265 bp, Glycine max
  Clone ID: 700905123H1
ggcatattgtgccctccctctttctagctatttccctctcttaacacaattaacaaagatatatcatatcatatcaactccaaatgatgaaaaatattgggttgtttcttcttgtggtggtggctacttttgtggtggcagccacagctggtagcttttaccaagactttgaaataacatggggtggtgagcgtgccaaaatctatgaaaatggaaatcttctcaccctctccctagacagagcctctggctctggctttcgttc

SEQ ID NO: 89995 - DNA, 265 bp, Glycine max
  Clone ID: 700905124H1
aaactgcgaatggctcattaaatcagttatagtttgtttgatggtatctactactcggataaccgtagtaattctagagctaatacgtgcaacaaaccccgacttctggaagggatgcatttattagataaaaggtcaacacaggctctgccttttgctttgatgattcatgataactcgtcggatcgcacggcctttgtgccggcgacgcatcattcaaatttctgccctatcaactttcgatgctaggatagtggcctaccat

SEQ ID NO: 89996 - DNA, 259 bp, Glycine max
  Clone ID: 700905126H1
ccacaaccttgaatgtttaccgccccgccggataaggagaaggagaaggaggatctgcgtcgcaggcactgttcatcgccatgtctcgggttgataacagaaattcctcagccaccaagcgtgctaggactgatggtagtcgtagggaagatgattggacatgccccagctgtggcaatgtcaatttctctttcaggacaacttgtaacatgcgtaattgcactcaaccaaggccggctgatcataattcgaaatctgc

SEQ ID NO: 89997 - DNA, 263 bp, Glycine max
  Clone ID: 700905127H1
gaaaactagtaatatggcttcaagaactatatgttttaccattcaagtgactcttgtagtagcttttctaacaacaaaggttgttttatctgatgacactgtgccaattcccgcgaacaaagcacaattaggtgaatggtataatactaatgtggggcctttagatcaaagaaagagcaccatggacccagcattggtgactgctgaagaaggcgctaaggttgtaaaggtgatgcaagatggcagtggggaattcaagacca

SEQ ID NO: 89998 - DNA, 263 bp, Glycine max
  Clone ID: 700905128H1
tgcttccctcatttctaagcctggtgtcagtgtacagcctctacctccgacgctgcttcacgggcgcggggctctcatcgcagacgcttagagtggacgacgaatccacgctccacttctgggccccgacaaacccaacggcccagaagccttccctggttctgatccacgggtttgggccggagtccatatggcagtggcgcaaacaggtccaattcttagcccctcacttcaacgtgtacgttccggacctaatattcttc

SEQ ID NO: 89999 - DNA, 268 bp, Glycine max
  Clone ID: 700905130H1
atggtacttttgatagagaaacttacaaaacattacttcaagctggagaatcaccaccatgccatcacacaccttcaaccagaggagttatcatcctcactgcttgcatttaaatcccatatgtccaaatcaattgaccaactagcatcggatttgaaacccggatcagagacccccctgtccttaacatggtttggaaagtgtttcggcctcttgcccttcatcaacaaggcttttggaaagcttgttgtggatattgactacccaa

SEQ ID NO: 90000 - DNA, 160 bp, Glycine max
  Clone ID: 700905131H1
ggcattttctttctttctttgtcttctccttgaatctgtagtaaaataaatgtggggtgtgttcccaagttgggtaagttcctatctgtcatggttccatttcaattgtaattttgaatttgctgctacctccaaaatatgatgtaattttctttccaaa

SEQ ID NO: 90001 - DNA, 272 bp, Glycine max
  Clone ID: 700905133H1
ctggttcagaacatgaaattgaagatcatccttctgaatcagcagctgccacaggcacaagtcagagacaggacaatcttggcaatcttgctttggtgactagcaatccaagtgaaaagatggataataagcttgtttatgtgacacaccgtggtatacggagacgctgtctagattttgaaatggccagtgtgcaaaggaggaacccagctgataattcaaacaccaactcaagtacagcaaaatctgaggagaggaatgttagtaatgaa

SEQ ID NO: 90002 - DNA, 265 bp, Glycine max
  Clone ID: 700905134H1
tgggagcttttcctccagttgacttacgagcagtttgctttgcttgcattgcaagaggctgctgaggcataccttgttgggctctttgaggacactaacttgtgtgccattcacgccaagcgtgtgactattatgcccaaggatattcagctggcaagaaggattcgtggtgagcgtgcttgagttggtgcgttctgtgtttgtgaagatggattgttggtggctgcggatggtgttttgttactaagttttctttttgttgaag

SEQ ID NO: 90003 - DNA, 58 bp, Glycine max
  Clone ID: 700905135H1
tcaacttgcttgactcgttgaatcaaccaagtcactgattcgaaatccactcaaacca

SEQ ID NO: 90004 - DNA, 261 bp, Glycine max
  Clone ID: 700905136H1
ggcaaggaccagcttctgaaccttctttgcgacgcggcggcgaagaccgcgatgtggaggagaggatccgaaaggcggcggatggagatccggtgcaccggaagatatttgtccacggattgggctgggacactaccgccggaaccctaattagcgcgttccggcagtacggagagatcgaggactgcaaggccgtcaccgacaaggtctccggcaagtccaagggctacggcttcatcctcttcaagacgcgccgcggcg

SEQ ID NO: 90005 - DNA, 261 bp, Glycine max
  Clone ID: 700905137H1
gtttttactggattttgttaaataatatgtatggtttttattgacaatcccgtgcagggctctccagtttcaattcagtgtttttgaaattagataaatcctactgattatttattttgtatttatgttgttatttcacatgctgcagtcatggatgaattttgtctcatacataagttgtagctttgaagtggtgtagcttgattgttttgaattaactttgcattttgttactgaattactcagatgctcttttttatc

SEQ ID NO: 90006 - DNA, 263 bp, Glycine max
  Clone ID: 700905138H1
gagggatcagcctctcgtgatcaacatggcttgatctccacaagattatccctttgacacttcaagtactaccaacattgattaaatcagactagtgaaatgtcaaaagaaaaggactcagctgacaatcaagtggatacattttctgagccagtcatgttggagagatttcatacacttatggagattgacaatctgcatcttgaaccagattgggatccgattgctgaacttgatagcatcttatctgatagttataatat

SEQ ID NO: 90007 - DNA, 165 bp, Glycine max
  Clone ID: 700905140H1
ggagattatataaactagaggaggcaattacaaggagtgacaatgttcaaggaactttatcatattgcctttacatctctcattcctttgtaaaccttaggtagtacagacaggaggttctccgtctccttgttaaagtatttcaaaagcttccttcaccagttt

SEQ ID NO: 90008 - DNA, 265 bp, Glycine max
  Clone ID: 700905141H1
gcttccacaacccttctccgactagaagaagttcagagacaatgggtttcaacaaaagttaccttcttttcaccgtgtccctctcatttctcctcctatccacccatgccatcagcagcattattgctccttctccctccccattcccaacccacaccaacaccaaaaccaaaaccatagactccatcttcaagaaagccctctcaaaaacccaaaacatgttaaaatcacccaaccccaaggtcctagacttctgcaaatccac

SEQ ID NO: 90009 - DNA, 261 bp, Glycine max
  Clone ID: 700905142H1
cccatggccaccacctccgcattcctcctccttccgctcctcctgctgctccacctcgccatcgccgctcacggcatcggcatcaactacggcacgctcggcgacaaccttccaccgcccgcggcgtggcgaacttcctgaagacgaagacgaccatcgaccgcgtgaagatctacgacgtgaacccggacatcctgcgggccttcgccggcagcggcatctccgtgacggtgaccgcccccaacggcgacatcgccgcct

SEQ ID NO: 90010 - DNA, 262 bp, Glycine max
  Clone ID: 700905144H1
tctttctctttctaagctctgaccccaatttctgtggcggctctctctctacttattttctcttctgagattgagatttggatccaccctcttccccttctttcggtctttgatttgatcttttccttacctttctttgggtttgggtctgggtcttcagcttcaacttcaacaacaacaccaaatcgctatggttacccaacaacagccacagccacagcttcaggttcagcctcagcagtcgacaccaccctcttcacaa

SEQ ID NO: 90011 - DNA, 264 bp, Glycine max
  unsure (1)..(264): unsure at all n locations
  Clone ID: 700905145H1
gagaaggctaaaaaaggctattatggcaggaggaggagctccagctaaagcagatgagccacagccacatccaccaaaggatcagttttcanatatttcttactgtattactagtcctcctccatggcctgaggccatacttcttggttttcaacattttcttgtgatgcttggcacaactgtgttgattcccactgctcttgttccccagatgggaggtggcaataatgagaaggcaagagttatcgaaaccctgctttttgt

SEQ ID NO: 90012 - DNA, 265 bp, Glycine max
  Clone ID: 700905147H1
gttggtttcggtgggtgaatgatcatccgaagaggctcaggaaaaggacaacttcgcaactcgtgaatcgattactgtagaaatcgtcgattctatcttaaaacgtattgggcactggccgccattttgaattctggttgagggattgaagtgcgattataggtggaggaggatggcttgtaggggatgctgggaatgccttttgaagcttttgaacttcatattgacccttgctggtctggccatggtcggctatgggatttat

SEQ ID NO: 90013 - DNA, 66 bp, Glycine max
  Clone ID: 700905148H1
cacacagcacgagggccaatcaatggatcgccgtgtccaactcccttgctctaacgacgtcgtcgt

SEQ ID NO: 90014 - DNA, 265 bp, Glycine max
  Clone ID: 700905149H1
gcatcaatgggccaaaagaaaagttagattccaccgttattagccagcctgctatttatgtcacaagtcttgctgctatagagctacttcgtgcacgtgaaggaggtcagcagattattgactcagttgatgttacatgtggtttaagcctgggagaatatactgctctggcatttgctggggctttcagctttgaagatggactcaagttggtcaaactgaggggagaggccatgcaggatgccgctgatgctgctagaagtgc

SEQ ID NO: 90015 - DNA, 116 bp, Glycine max
  Clone ID: 700905150H1
gaaaaaaaaaaagagagagaagatgacgcggggaaagcagaagatcgaagcgcagaagcgaaacgcagagaggaatcagaagggaaagggctctcagctcgaggccagagccgttg

SEQ ID NO: 90016 - DNA, 264 bp, Glycine max
  Clone ID: 700905152H1
aaagaatacaaaccttgtctttgaaccagctcaaggagcttccaccccagttcatccgtccagccaatgaaaggcctgagaacaccaaagccatagaaggtgtcattgtgcctctcatctcactgtctcagtcacatcatcttttggtgaaggaaatagctgaagctgcttctgagtggggatttttcgtcataaccgaccatggtatgtcacaaacattgatccaacgtttgcaagaggttggtaaggagttctttgccctcc

SEQ ID NO: 90017 - DNA, 262 bp, Glycine max
  Clone ID: 700905153H1
gtggaattttttttcgttcctgtgaagttccattccatattctgggtatgggtctataaaacaagcttccaaattggagagaaagtcccaaacttttcggttcaattttgagttttcgcaattgggtctgtgatcttcatgtgtgggtgagcaaggtttgaaaaaactttctgtgatcgtgattttggccccaacttcaattgtggctgcatccgctgtaatttgttcacaattttccgcaatatcaaaggatcgtgacgac

SEQ ID NO: 90018 - DNA, 261 bp, Glycine max
  Clone ID: 700905155H1
atcagaggattcgctccaacccctatcgagtaaggtattatctgtcaatttacattcgaaagggttaggctattgaattttaaataattacagataaaataatcgatagctttgattttaaaaattaatcataatcatcggttaggttgcaacataatacttaattcgcttaattttttaactgcgcctcagagtattcataacatattctattaaattaataagctggtgatgtaattaatattaatatgtagttttggc

SEQ ID NO: 90019 - DNA, 259 bp, Glycine max
  Clone ID: 700905159H1
agctcactattactgatgatgatgtgatagagaagagtaacttaagcagacagttccttttccgtgattggaatattggacaggccaagtccacagttgctgcttcatctgctgcagctataaatcctagttttaatattgaagctctacaaaatcgggttggttctgaaactgagaatgtgtttaatgataccttctgggaaaacttgagtgtcgttgtaaatgcactggacaacgttaatgcaagactatatgttga

SEQ ID NO: 90020 - DNA, 165 bp, Glycine max
  Clone ID: 700905162H1
cgggtgggttctgttcaacattctgcagccggcgctgaaccaactgaaccgcatgcgcagaccaaaggcgtgatcattgggttggggcttggcggcttggctggcttggtggctgcgccgcatgcatcggcggcggcggcttctgaagtggcggcgatggctgaa

SEQ ID NO: 90021 - DNA, 198 bp, Glycine max
  Clone ID: 700905164H1
ctcttccttaaaaaccccaaacgcataaaaaacacagagacagtgttcttagcgccgccgttgccctaccatcttcatattattctattgcctttctttcacgtttttctggtttttaagcccttccagtgccctatttacgcttatacccttctggttatgatagcttccattcggcgtcagcatagagccgaagct

SEQ ID NO: 90022 - DNA, 263 bp, Glycine max
  Clone ID: 700905165H1
tcgtgttgtaacttctctcttcaaccctagcttagggtttatgctctaaaaccctcccttttcaggtttattgggagagaaaaatgctcgtattgtttgaaacacccgcgggttttgccctgtttaaagtgctggatgaaggcaagctttctaaagttgaggacttgtggaagaacttttccagtgcagatactgctagacaggtggtcaagttgaaagcattttctaaatttgagaacacttcagaagctctagaggcagct

SEQ ID NO: 90023 - DNA, 262 bp, Glycine max
  Clone ID: 700905166H1
gccctgttcggaaaatacgagctgggccgcgtcctcggctgcggtgccttcgccaaagtccactacgcgcgcaacgtgcaaacggggcatagcgtggccgatggcggtgcggtggaagaaggagtgtggggtggagttggaagggatgaatgggaggtttgggattggggtggaggtttaccggctcacggcggagctcgcggtggtggaggtaaggaagaggggcggcgacgccgtggccgcggcagtgaggggtgtgtgg

SEQ ID NO: 90024 - DNA, 118 bp, Glycine max
  Clone ID: 700905167H1
gttcttgattgtaggataacattggagttacgttgattgtctgaatgtatggtatacttccatacagaccttggtgatcccttctttggttgttactgtgatatgtagatagtagatt

SEQ ID NO: 90025 - DNA, 199 bp, Glycine max
  Clone ID: 700905168H1
gtcattttcccttttcagctttcattggtgtggcctagctgttttctcaatgagaaagccttcatctctgcaaagcgcacttttgcgctttggggttcccttgttgcttgttatcaccttctgttatgctacttctactgctgcagcaacaactcaagtttcagggaatgaagagctgccaaagacaaacctaaatggg

SEQ ID NO: 90026 - DNA, 261 bp, Glycine max
  Clone ID: 700905169H1
aacctgagaaacagcaccacccttccttccttccttcgagaaaagaaatggaagacgtgataacagaagcagcacccccatcaaggttcctggaagaagacctaaacatcttcacacccccatccccacctctccccacacccttcctcatcttcccacacaacaaactacccctcaaaccctctcttctcatcatcgccctctccccctcttccctcgccctcttcaaccaaaccctaaccctaaccctaacccctctcg

SEQ ID NO: 90027 - DNA, 257 bp, Glycine max
  Clone ID: 700905170H1
agagagtgtctgactccgagtctgtctttgttgcgtttcgagtgtctgtggaatccctaaccctaatttattgtgtggcgaaatgggatcaattggggtactcctggtggctcaggtgataccgtacctggagcaagagctggacaagcgctacaagctgtttcgggcgtatgatcagccgcagacggcgcaggttctaagccagcacgcgagctcgatccgtgcggtggtcggaaactcgaacgccggcgccgacg

SEQ ID NO: 90028 - DNA, 256 bp, Glycine max
  Clone ID: 700905173H1
catagtcatttctcagagttcgctcgggaagatgatgatttggaaagtctggagagagatgttagtgaagaatctggctggaaacttgtgcatggtgatgtttttcgaccgcctcgcaacttagttattctttcagctgttgttggcacaggtgctcagcttgcgttgctggttcttcttgtcgtcttgttggctattgttgggatgttgtatgttgggcgaggagccatcatcactactttcattgtgtgttatg

SEQ ID NO: 90029 - DNA, 257 bp, Glycine max
  Clone ID: 700905174H1
attcaacttaagagatcaatatggccaccaccactacccagcctccctctaatatctgttttttccttctgttgttgcttctagcacactttcatttgggcataagccaacttgagctgaattactactctaaaagctgcccaaaagctgaagagatcatcaaggaacaagtcacacaactatataacaagcatggaaacactgccgtttcgtgggtcagaaatctcttccacgattgcgtggttaagtcatgcgat

SEQ ID NO: 90030 - DNA, 255 bp, Glycine max
  Clone ID: 700905175H1
gcggtgcgttatggaggaatgatcggagtagcagccatgcccagtggatgtagcatcagagcaatatggattctcaacaaccttgacggcgtcgttttttcccggaggtttccggtggtagagaagcgttggcgagctgcttgcaactcaaacgcccacaatgatacccatcaaatcttctcttccttacccactgactccgacctcgctgatgcttttctcgaccgaaagcatagggagggatctgcacgagga

SEQ ID NO: 90031 - DNA, 257 bp, Glycine max
  Clone ID: 700905176H1
gtgaaaaaacgtttacaataatgagtcttggtcaatttatttgcgaaaatgtatgtatagttcaaacgaaaaatgcaccacacctaaaatcgggtcaaattctaacagttcaaatggattctgtaggaataagatcggctaacccttatttggcgactcctggagcaacggttcatggccattatggggaaatactttctgaaggagatatattagttacatttatctatgaaaaatcgagatcgggtgatataaca

SEQ ID NO: 90032 - DNA, 257 bp, Glycine max
  Clone ID: 700905177H1
gaagaagtgaatgctggtgttaaagagatgctggaaactaatcacttaatttggaagcaatactataataaggaaaaggaccttgactatactcaagagcatagtagatatttggaggctttaaggcccagcagcctatccttgatgaatcaactccgcatttatttgcccgagctctttccagatctcaaaaagatagtattcttggatgatgatgtagtagtacaacatgacatatcttctttgtgggaactaga

SEQ ID NO: 90033 - DNA, 259 bp, Glycine max
  Clone ID: 700905178H1
ctccacaatcccttctccgcccaccgcaccgcctccggcgccatcttcgcccgcggcgcccaggacgacaaatgtatcgctattcagtacctggaagccatccgcaacctcaaatcccaatccttcactccacaccgcacaatccacatctccctcgtccccgacgaggaaatcggcggcatcgacggggccgccaagttcgtggagtccgaggaattcaacggactcaacgttggattcgcgctcgacgaggggcagg

SEQ ID NO: 90034 - DNA, 261 bp, Glycine max
  Clone ID: 700905179H1
gttgccggctccagcaacctctgccaatctttaatgggtgtgattgatttctacaacactggtgctttgtgctgggttaagtccaacgccaatctgaagcagcaagtgggtttggcaccaagacccatttgttcatttgaggggaataatcagaggaagtttgtggcaatggcttctaccgttcctgtggagcaagtcaacaatggccccctgcaggtgacaggtgactccttcatcagagagcatctgaggaagttggct

SEQ ID NO: 90035 - DNA, 263 bp, Glycine max
  Clone ID: 700905180H1
gttcctttgtcaataagcaagaccaatacactgtggaaggagtgcagaatcttggagacaaagcagtgatgtgtcataggctaaatttcagaactgcagtattttactgccatgaagtccgtgaaacaacagctttcatggttccattggtggctggtgatggaaccaaaactcaggcacttgctatttgccactcaaatacttctggaatgaatcatcaaatgcttcatcaacttatgggagttgatcctggaactaaccct

SEQ ID NO: 90036 - DNA, 263 bp, Glycine max
  Clone ID: 700905181H1
ctctcttcaaattttgttcgttcaggtcaaagaaagtgtcactgttgttaccatggccgaggaagttccaaagacaagcacaactccagaggaggtggtggtctctgacgtggcacctgctgacgagaaaccagacaccaccaccgacgttgttgttcccgtagagaaagacgcacaacaagaacaagaaacctcgccagagaaggagaaagagaacgttcccgaaacagctgaaaccgagtccgaggttgtttcaaaaccaa

SEQ ID NO: 90037 - DNA, 259 bp, Glycine max
  Clone ID: 700905182H1
cagaaatagaatcatctctctgtctagggtttcattctttttcagctttatttgttctgtagatccatctagcttcggtgctgcaaatggacgtcgcagtcactgccgttcggtcaccgctgatcgtcctgggaagtccggtcaacgggtccgcctcagctcggttgggttccacttttgggttttccagaaagtatttatcccgaagcaagttcgtagaagagggtttgttgttagagctgcatcctcatctccggag

SEQ ID NO: 90038 - DNA, 259 bp, Glycine max
  Clone ID: 700905184H1
cctcgatccaccatctccaatcctcctccctaatccctattcacatttcacaatctcacactacccaatttctcacattccaaaacgcaactgcgacaccgccgacgaggttgtcgtttccacgttttcccgccacccacattcccgatcaagttgccgttttgatgcctcccacgcgcccctaccaaaaaacgaatcgtgggtttgggttcccagcgattagcatcaaatgcagctatcgaaacgaatcgtgggccct

SEQ ID NO: 90039 - DNA, 256 bp, Glycine max
  Clone ID: 700905185H1
tctgcttcccctggcaaccttcttcttagttctctccgcttcttatctccagattgctggggcgaaagcacaaccgttgactagtctcaagcttaactctccgatccttcaggagtctattgctaaagagatcaatgaaaatcctgaggcaggatgggaggctgctataaatcctcatttctccaattatacagttgaacaatttaagcgccttcttggagtcaaaccaacgcctaagaaggaactgagaagtaca

SEQ ID NO: 90040 - DNA, 257 bp, Glycine max
  Clone ID: 700905187H1
aacatattcttcagttagctcccccaacctatacacttcaccaccacaccacaaccctaccctctctctctgtcatggtcattggaggagccttccctcgtttcgacccaatcaccaaatgtagcacccaagaccgctccaaccagaccatcgcctcggacctcgatggcaccctccttgtctcccggagtgccttcccctactacttcctcgtcgccctcgaagccggcagcgtcttccgagccctccttctctta

SEQ ID NO: 90041 - DNA, 154 bp, Glycine max
  Clone ID: 700905190H1
tccaattccctcaccagaacacgggcagagttgttttccctttcaacaacattcgccatagtttcgcgacgaagagaaaaaaaaatggggtgttagggtttcgattctctgcgacgctctccgcattgcgctaccctgcaccttccacacaata

SEQ ID NO: 90042 - DNA, 253 bp, Glycine max
  Clone ID: 700905191H1
tcgatattcgaggtggactgggcatagattacgacggttccaaatcgtgtgactctcatatttccgttgagtacagtctcgaggattatgcagtcgcggttgctcacgcggttcagtgtgtgtgcgaccgaagtccgtgaaacacccagttatctgcagcgagagtgggagagccatcgtgtctcatcattcggtcttgattttcgaggcggttggcaccagcagcaccaccgggggaggagcttcccctgca

SEQ ID NO: 90043 - DNA, 253 bp, Glycine max
  Clone ID: 700905192H1
tcactcttcttctcttgcggctagggttttagcgcacttcttctagatttaaggaagatgggtaaggaaaaggttcacatcagtattgtggtcattggccatgtcgactctgggaaatccactaccactggtcacctgatttacaagcttggaggcattgacaagcgtgttattgagaggtttgagaaggaagctgctgagatgaacaagaggtctttcaagtatgcctgggtgctggacaaacttaaggctg

SEQ ID NO: 90044 - DNA, 259 bp, Glycine max
  Clone ID: 700905194H1
ggtaggtactctttggaaatgtctgctgttatttacaaggactgggttttcacttatcaagcattgcctaatgatcttgtcaagagaggagttgcggttaaggatccatctgctccccatggagttcggcttttgattgaggactatccttatgcttctgatgggctagagatatgggatgccatcaagtcctgggtgcatgaatatgtctcattctactacaagtcagatgcagcaattcaacaagatcccgagctcc

SEQ ID NO: 90045 - DNA, 85 bp, Glycine max
  Clone ID: 700905195H1
ttccaatatattccattctctctgtgtatttccctacctctcccttcaagatgcagatcttcgtcaagaccctcaccggcaagac

SEQ ID NO: 90046 - DNA, 213 bp, Glycine max
  Clone ID: 700905196H1
aaacttcgaggtttggggaacactgctgccagtagtgatggaagtagtagtggtactttcttcagggctgttctattggttcgtagaggaaagtatgatgaagcacgcgagtatgtagaaagagctagaaaatgtctggcaacagagcttgctgctctggttttggagagttatgaacgtgcttacagtaatatggttcgtgttcagcaacta

SEQ ID NO: 90047 - DNA, 265 bp, Glycine max
  Clone ID: 700905201H1
gagagcagtagctccaacaccttcccttatactattagaacgaaaccttaacaaccaagtcaacaaccaccttccttaaaaagttgattatcacctagtttttttttttttaattctctttccctttccctgtaatcatcatcaaccacttgttgaaaggaagcatccctcccaatgagaccggcattagttaaagggtagcctgcagagtatggtactgatagtagcagtgtgtaatggactccccattttccttcaatttaac

SEQ ID NO: 90048 - DNA, 258 bp, Glycine max
  Clone ID: 700905204H1
gcgagagttctgagaagaaaagagaagatcggtgagtgaggaagcaaatagcaatagcaccgccaccgtcaccactgccactgccactgccactagcaacagcagaatgggaaccttgggcagagttttctacgccgtcggattttggatccgcgagaccggccaagccatcgatcgcctcggctctcgtctccaaggcaactacctctttcaagaacagctgtctaggcatcgacctctgatgaatctgttcgacaa

SEQ ID NO: 90049 - DNA, 252 bp, Glycine max
  Clone ID: 700905206H1
ctgcattcggtgctctccggtggggctccgttgagcaaggaggtcatagagggctttgtggccaagtatcccaacgtcaccatccttcagggttatggtttgacggaatccaccggcgttggggcctccaccgactccttggaggagagtcgaaggtacggcacggcggggctcttgtctccggccacccaggctatgatcgtcgatcctgaatccggccaatcgcttccggttaacgcaccggggagctct

SEQ ID NO: 90050 - DNA, 254 bp, Glycine max
  Clone ID: 700905208H1
gcaagtgttgaagataatactttagttagcaaggaagagccactagcatttgattctgatgaacgagatgccaagaggccaaagcttatgaatgcaggtggtccaagtcgcagattcactagaagcatgataaaaagaacgtgtaatgtcgtgtaaatactgttataaccaccctgctgctactaacactatttacacgacattacacgttctttttatcatgtaaatagtgttagtacagcagggtggttata

SEQ ID NO: 90051 - DNA, 228 bp, Glycine max
  Clone ID: 700905209H1
accagatataaagtcgcagctgaagtgaaagggtgttataattgcgcttttgtgttgatatttaaggtatcgagatcttttttatgggcaggattcatcaactgcagaaaacctccataccatcaaccttcctatgcttgtttgtattaattaactgataataatactgtatggtttggtacttgctaaataaaaagaaaagataaataaggtatcgaaaatcagggg

SEQ ID NO: 90052 - DNA, 254 bp, Glycine max
  unsure (1)..(254): unsure at all n locations
  Clone ID: 700905210H1
ctaggtagtgattccctgcaatctagtgccattgcaagaggttctgtcatggattatccacaagcaattactccattacacccttatcaaactactcctgtgaggaattttcttggacataacacaccttggatgtcccaaaccccccttcgaggaccatggattggttctccaactcctgcacctgacaatagcacccatatttctgcacctggnncctcagatacaattaagctaggttcagtcaaaggatc

SEQ ID NO: 90053 - DNA, 252 bp, Glycine max
  Clone ID: 700905211H1
cttagtttctccaaacccaaactttcaccacagggacctgtcagagttagttaacgtttttacatcatcactgtgtgaagataatatagatatggaaatctcccatgacatcaagatcaaggatgacaagctaggtggtgtgaaggaagagaagattaaggtagaagttgaactgaagaataaatcagttgagaaagagcatacaaaaagtaaagaagagaagaaacataaagatgagataaatcaaagaaa

SEQ ID NO: 90054 - DNA, 251 bp, Glycine max
  Clone ID: 700905212H1
tataaattcaattaagcagttgatgccctgatcccgggaataagataactttctcttccaggtattcactcatcccctctcagtggcaagagtgagtagatagcagaagttatttcattcctcattcctgggatattcgttaagtttgcccattaggggtctttctcaccggtgctatcaataagaaggagccttttccctgggtaggctaagccagaaaagagagaaagagaaaaagagttaaaaggcta

SEQ ID NO: 90055 - DNA, 251 bp, Glycine max
  Clone ID: 700905215H1
caaaatctaccatagcggttccattttctgaatttctcgagcgaacttcgcccagttctagggttccccactgccatgtaccaggccgaattaacctccgaacaggttctgaggagggacatcccatgggagacctacatgtccaccaagctcatctcagggacgagccttcagctcttaaggcgctacgatcaccgaccagaaagtcacagagcacagttgctcgatgatgatggtcctcttatgttcgc

SEQ ID NO: 90056 - DNA, 253 bp, Glycine max
  Clone ID: 700905216H1
gtgtgcttcaaattctgtgcggatagttgaggacttggagatgtttgtttctcaatcgaagcatcttaaagtatctttggaagaaagaggaacgcttgaattagttttgaagaattgcagaatatgggagtatgaagcatgttctgtactagatgatgctcggtgcttattggataattctttgcctgaaataaacagtggtttaacttgtaaagtggaagatttgattgaaagaatcaatctgctatagcat

SEQ ID NO: 90057 - DNA, 257 bp, Glycine max
  Clone ID: 700905217H1
caaatccgccgtgcaaattgaccagctcactatgtactccggtgtcttgggtgatcccagggataatggggatttatatcccggcttcaacggcggtgggaccgtgaccggagccaccagcaaaggcaacactgacgggtccagcagtgacgatgggggggacttcttcgggatgatattcagaggtggcagcagcagcagcagcagcagccaagcagcgccaccatcgtccgttctatttgttcaatctttttgtc

SEQ ID NO: 90058 - DNA, 257 bp, Glycine max
  Clone ID: 700905218H1
cggtggcctttcaacaagctagtaagagaaaaggcccttcaggtaacaatgaagcatatcctttacgaagatgaaaatagtcgatacataaccattgggtgtgtggaaaaggctttatatatgcttgcttgttgggtggaagatccaaatggagatgctttcaagaagcatcttgcaagggttccagattacttatgggtttctgaagatggaatggccatgcagagttttggtagccaaggtgggatgctagtttg

SEQ ID NO: 90059 - DNA, 253 bp, Glycine max
  Clone ID: 700905219H1
cgcaattacacaatctctctctctgctcgtgagctttctacggtttcgattcgatcattcccctcttgttttatggaggtataggtagatgatgggaaaacgtgtctcaagagagcactttcaacccaggccgtgttctgggaagacagagaatttaaaaaacaccgtgtttattgatgtagatgatcaagttgatgatgtggatgtggtgatcatagattacaaagagttcatgtctaaacacatggatctg

SEQ ID NO: 90060 - DNA, 251 bp, Glycine max
  Clone ID: 700905220H1
ctcttgatttgaaggttgttttgtgcttatagataaaagttctgccaaatcaagaggggttttcagatcatagtgtgtgtgtgtgtgtgttaaacaatggctaagttctttgctgctatgatcttggcactcattgccatttccatgcttcaaacagtggttatggctgctaatgagcaaggaggccacttgtatgacaacaagagcaaatatggaagtgggagtgtcaagctggaacaatgcccatcaca

SEQ ID NO: 90061 - DNA, 251 bp, Glycine max
  Clone ID: 700905221H1
caagaacaactctataaacatatatcactttgttctcaacttttcacaacatatcctaagaatcttccttctctctctctctctctctctctctctctagcacaaaccacacacacaaagttgcatcaagatcaagatcagtcttattatactattactattactttccacatcaacagagaggcgctcctaccccacgattgttttagccaccatgtgtgtgaaggaccaagagagaatatgatggatag

SEQ ID NO: 90062 - DNA, 250 bp, Glycine max
  Clone ID: 700905222H1
attaaatctctcttccccctctcctgatcttagatctcgtctgacactactcttaagatcttctgccataaacctccaaacccttctcttatccattgctctctttggccactgagatcatagacacaactctgccatattcaatcttttatttgcttttacagctatatttgtttctgaatcatgccacacttttcaagtccaaacgcattcaactaggattttcaaggtacaaatacctacacgcctc

SEQ ID NO: 90063 - DNA, 248 bp, Glycine max
  Clone ID: 700905223H1
atggactctcccaacgctttgtctaccgctccggcagcgggtagtaggaagaacgcgacgctaatttgcgtcccaataatgggagaatcagttgaaaagatggagattgacgtggacaaagcgaaagccggaggcgcggaccttgttgaaattcgattggattctttgaaaacctttgacccctatcgagatctcaacgctttcattcaacaccgttctttacccttgttgttcattacaggcccaaa

SEQ ID NO: 90064 - DNA, 252 bp, Glycine max
  Clone ID: 700905224H1
agaagaaaaacaaaaccctcactgagcgctgctgctttgagagagagatggctccgaaccttgaatgtcgtatgtacgaagcgaagtacccggaggtggacatggcggtgatgatacaggtgaagaacatagcggacatgggggcgtacgtgtcgtagctggagtacaacaacatcgagggcatgatcttgttctcggagctctctcgacgtcgtattcggagtgtgagcagcctcatcaaggttggccgca

SEQ ID NO: 90065 - DNA, 250 bp, Glycine max
  Clone ID: 700905225H1
ttcacttcagaagttccctctctctctctctctctctctctctctgcactgagcttgagaagagatatactcaaaagagacagatagattcactgagaaacacgatgccgtcattgccttcttcttggttcttcacaacgcttctactatgcttcttcttacatgttacttttgcaggtgacccttatgttttctatgattggaccgtgtcctacacctcagcctccccacttggagtaaacagaaggta

SEQ ID NO: 90066 - DNA, 248 bp, Glycine max
  Clone ID: 700905226H1
gcggtccttccggaagaacatgttagctgtacaaaagagcgtcggagaagagaacgagaagaacagcagcagccctaatgcaagctttgtcaaagttagcatggatggagcaccttacctccgcaaagtggacttgaagatgtacaagagttaccgagagctctctgattctttaggcaaaatgttcagctccttcaccataggcaattgtgaatcccaaggaatgaaggatttcagaatgagagcaa

SEQ ID NO: 90067 - DNA, 230 bp, Glycine max
  Clone ID: 700905227H1
gttcttgtgatgttgatatcattgacacctcaaaaacatcacaaggaaattatgtacaacttagacctgcattgagcataatttccttgtgatgttcttgtgatgttgaaatcattgacacctcaaaaaaaaaaaaaaaaaaaaaaaaaaaaaaaaggggggcccccagattagggactctgcggcccgagaattttattggggccgggcccttgagggggatccatttt

SEQ ID NO: 90068 - DNA, 251 bp, Glycine max
  Clone ID: 700905228H1
atatattccattctctctgtgtatttccctacctctcccttcaagatgcagatcttcgtcaagaccctcaccggcaagactatcacccttgaggtggaaagctctgacaccatcgacaacgtcaaggccaagatccaggacaaggaaggaatccccccggaccagcaacgtctcattttcgccggaaagcaacttgaggacggccgtacccttgctgactacaacattcagaagggagtactcttcacctc

SEQ ID NO: 90069 - DNA, 250 bp, Glycine max
  Clone ID: 700905229H1
gttgggcaagaagaggtcctcttccaatttgaagctagcgaggatggacaagtccagttctttccaaatgctccagttgatgttgacaattctcccagctttgttgccatcaatgtcagtcctattgagtatgggcatgttttgctgattccgcgcattttcgagtgtttgcctcaaaggattgaccgtgagagcttcctccttgcacttcacatggcagtggaagctgataatcatattttcgattggg

SEQ ID NO: 90070 - DNA, 105 bp, Glycine max
  Clone ID: 700905230H1
gtagtccaaaaaagatagatagctacggcgagaagagatcgaacgaaggacatcgaagccaaagaacaaaaatgaacggaacaacaacactttcaacaacaccac

SEQ ID NO: 90071 - DNA, 248 bp, Glycine max
  Clone ID: 700905231H1
cttttgggggagagtgagtgagagtaaaaagatgtttctgcgtgcggtggcgcggccgttgatggcgaaggtgaaggcttcgacggggatcgtggggctggacgtggtgccgaacgcgagggaggtgctgattgggctgtacagcaagacgctgaaagagatccagaaggttcccgaagatgaagggtaccgcaaggccgtggagagcttcaccaagcacaggctcggcgtgtgcaggaggaggagga

SEQ ID NO: 90072 - DNA, 253 bp, Glycine max
  Clone ID: 700905232H1
gtcgaacagtcaactcagaactggtacggacaaggggaatccgactgtttaattaaaacaaagcattgcgatggtccctgcggatgttgacgcaatgtgatttctgcccagtgctctgaatgtcaaagtgaagaaattcaaccaagcgcgggtaaacggcgggagtaactatgactctcttaaggtagccaaatgcctcgtcatctaattagtgacgcgcatgaatggattaacgagttcccactgtccctgt

SEQ ID NO: 90073 - DNA, 256 bp, Glycine max
  Clone ID: 700905234H1
cttgagcttttctttctttctctgctctcttttcttttaggtttccactctcacacactctccctcttctctttctctgcaataatctctcttctcttcttcactctctcaactcctgccaaacccccatttccgcagttcttaaatttggcgtctgatgtctccgccattgctggttaccgaagatgaagggcagtgccatgcctcgatggtagcatctgcatcttcaccatccctgaatgtttctccctaaatg

SEQ ID NO: 90074 - DNA, 257 bp, Glycine max
  Clone ID: 700905235H1
gtctgtcttgcgcatgctctctactcacctttgtagtcccggccgtcaaaatacccattcccatcgcctttctctctccttcttcctctgccccccaaaaaaatgaagcgcttcatgctcccaagaaaccctctcagcgacgcagcagagcttccttcttcgccaagcccaaccccaactaccagctttgccaaactccgtccctcttctcacaaacacaaaccctccaaagagaacgacttccctccgatcccaat

SEQ ID NO: 90075 - DNA, 254 bp, Glycine max
  Clone ID: 700905236H1
acaggaaggagttcaatgtacctcaccggtcatcaccaagacttgctggaagtaaacctgtccagttggccaacaatgtgatgaatgaacagactctccaggttcctaaaagaaacttgaggaaaagtagaaacactctagatattgatatttctgaagaccaaacagtttctaaggaacaaccgcatcagcaagaagcagataaaatagaagacaaaaagccagaaattcaaattagctcaaacaaatcaagt

SEQ ID NO: 90076 - DNA, 251 bp, Glycine max
  Clone ID: 700905237H1
acaggaaggagttcaatgtacctcaccggtcatcaccaagacttgctggaagtaaacctgtccagttggccaacaatgtgatgaatgaacagactctccaggttcctaaaagaaacttgaggaaaagtagaaacactctagatattgatatttctgaagaccaaacagtctctaaggaacaaccgcatcagcaagaagcagataaaatagaagacaaaaagccagaaattcaaattagctcaaacaaatca

SEQ ID NO: 90077 - DNA, 249 bp, Glycine max
  Clone ID: 700905238H1
cctcgctctatttctcagtctctgtgtttgcggctgaggattccgaacgagtgaccttctttgtttctcgcaaagtttaagtaatcatgggtaaggaaaaggttcacatcaacattgtcgtcattggacatgtcgactctgggaagtcaactaccactggtcacttgatctacaagcttggaggtattgacaagcgtgtgattgagaggttcgagaaggaggctgccgagatgacaagaggtcattcaa

SEQ ID NO: 90078 - DNA, 250 bp, Glycine max
  Clone ID: 700905239H1
ctaatgtgctcttcgactctatcgtcctattctttcctcacaatcagctccacatttttcaaatcccaattttgccctcctcccttcccctctcgcgtggtggcgtgtcacgttggatccaattccaatgttcaaaagcacgttgccaccgacctcaagttcgtcctccacgacgccctccatgactctggaatcaacaccactcatgccagagaagctagcgagcatttctgctcacaaattaggagat

SEQ ID NO: 90079 - DNA, 130 bp, Glycine max
  Clone ID: 700905240H1
gtgatgatggaattggaagttgacgagaacgaattgaaagctgcaggtgctgagatattcgtagacggtggtgggagcggcatacgaatcaatggttgggtgatcgagattaggaggaactccatactca

SEQ ID NO: 90080 - DNA, 248 bp, Glycine max
  Clone ID: 700905242H1
cttctttattccttttgtaatttcattcattcttaatctttgtgaaaaataatgttcatcgagaattttaaggttgagtgtcctaatgtgaagtacaccgagactgagattcagtccgtgtacaactacgaaaccaccgaacttgttcacgagaacaggaatggcacctatcagtggattgtcaaacccaaatctgtcaaatacgaatttaaaaccaacatccatgttcctaaataggggtaatgctt

SEQ ID NO: 90081 - DNA, 250 bp, Glycine max
  Clone ID: 700905244H1
attaaatttgtccattccacgctatcgtctcttacacttccgtgcaacgcagaactttgctggcgtactcatcgtgacgaaattaacccaacagcacacagcactttccccaaatcaaatcatcgaaaccctaactcgcgattcccgatcgaaaccctaactcgcgatggcgatcttgctgggcgaaattcttcaatcgctggagctgtggctgaagctgatcaagaacccgcagctcagccctacgtga

SEQ ID NO: 90082 - DNA, 249 bp, Glycine max
  Clone ID: 700905245H1
ctgggccatatcacactctgttagcatatggagaagaacactccattgttgacattgagaagagaagagaagcaggagaatgcaatgggggctttgtacatgtcagttatggagatactcttgttcctcttcatattcatatgctctctcacaccaatctcacagtcacagggattacatcaatctcccccttttctctttggcacttcttcttcttcgtaccagtatgaagggcttatttgagtgatg

SEQ ID NO: 90083 - DNA, 247 bp, Glycine max
  Clone ID: 700905247H1
cttctcttgctacttgctatgctcatcttcaaaactcagccttactcatactcatgctgagccaaaacccaaacccaaccaccatggacatgattcctgggaagatccgaaaacgaggctgttcctcctcggcctcctcctcctcctccgtgctccacaactaccgcttcaagaggactattctcgtcggaaagaggggcggatccagtacgcccgtgcccacgtggaagctcagagctcgagatct

SEQ ID NO: 90084 - DNA, 253 bp, Glycine max
  Clone ID: 700905249H1
agcgaaagagccattttctgattctaccaaatctagggttagggattcaatttaccaacttcctctctctctctctctctcttcatattcttttccttgctacgagaaatataattactctctatatctctctcttgctcattacgaatatcagtttacctcgagctaatcatattcggaagaaacatggttttattatccggagaaaatcatcgtcacaattttctcggctaacctttgaattatatataat

SEQ ID NO: 90085 - DNA, 256 bp, Glycine max
  Clone ID: 700905250H1
gagaaaagtggcggtgaaaaatgaaagtgacttggaagaacaagaagaagaaacgttgtttacccacgttgtcacacttcactgaccttccctttgagcataatcatcaacaacactccaacaccgacgctgaagatggcgcgcatgttcccgacgccacacaattggctaacgaatttcaagctcaaggagacaagcttgctatggatgggaagtaccgggaagcactaggtaaatgggaagctgctcttgcgtt

SEQ ID NO: 90086 - DNA, 252 bp, Glycine max
  Clone ID: 700905251H1
ctgttgccaacttctataagacttcggcttcgatggctggaacacctgagcatcttgggatattgattagtgagaaactgaggcacccaagtacatggctcttgttgctgtcattatggctgctgtccacatggtttggcacattcatactgtgtggcatgttgagcctctcaacaaagtttcccttcttccatagctaccctgagttgtctcttcttaaacagcaaaaagtgatgagtcttggtctctcag

SEQ ID NO: 90087 - DNA, 249 bp, Glycine max
  Clone ID: 700905252H1
cttcactagtgctgcttctctttgactggagcggaaagagagatgcttcgagaaaaaggttcgatatcaaagccggaaaagactggcagagcagcggcctcgggtgaaggggcagtttgtacgacaacataatcatccattcgctgaggctggtggtgattcatgaacattgttctctttaggtttcctgtagtattaaattacagttgactgtaacaccgattgtgtcgacaagattagcagtagggt

SEQ ID NO: 90088 - DNA, 250 bp, Glycine max
  Clone ID: 700905253H1
gtaacttcaaaacatacaccccttctctctgtttctcttcactctctctctccctccctcttcaactaacatggcaatccacaaccaagacaccgctgtcagagaaatcaagcccaagaacaggagaatcatgggtgctggagggcctgatgatgaggacaataggtggccaccgtggtcgaagccactgctgaaagagagcttctatgttcaatgcaagttgcatgctgattctcacaagagcgactgc

SEQ ID NO: 90089 - DNA, 243 bp, Glycine max
  Clone ID: 700905254H1
agagaaccccaaagcgtccaacagcattgcaaggatagttaataaaaatcatttcatgagactccagaaccttctcactgagccaagggtcaaagaatcggtggcttatggtggttcaatggacgacaatgacttatttattgaaccgacaatattgctggatccgccacttgattcagcagtcatggctgcggaaatctttggccctgtacttccaataatcaccctggagaagattgaaga

SEQ ID NO: 90090 - DNA, 245 bp, Glycine max
  Clone ID: 700905255H1
gtttgataaaatattgtacacataaatctagctccaattcctaatcacctggttaatttcttcacatagagctatcaagatccaacgttaacatgaagaatgttttagtaaggtcagctgcgcgagctctgcttggcggcggtgggcggagctactaccgccagctctcaacggcggcgatcgtggaacagagacaccagcacggtggcggcgcgtttggaagcttccacttgcggaggatgtcc

SEQ ID NO: 90091 - DNA, 247 bp, Glycine max
  Clone ID: 700905257H1
gactaacccttccttggatctctttctacctcttttctccgcgactggtttcagtttgaacctaaggcagagaagccagagagtctcctctgccttagagaaactctcacaatggcgtttcaggactttgatctcatctcagagaggagaaggaacgagaagaggcaaaaggcgaggaagaggatcatgattggcgtggtctcttccgttgtcctcgttgccatgataggtgcatactcttcgttgt

SEQ ID NO: 90092 - DNA, 248 bp, Glycine max
  Clone ID: 700905258H1
ccctcgctctatttctcagtctctgtgtttgcggctgaggattccgaacgagtgaccttcttcgtttctcgcaaagtttaagtaatcatgggtaaggaaaaggttcacatcaacattgtcgtcattggacatgtcgactctgggaagtcaactaccactggtcacttgatctacaagcttggaggtattgacaagcgtgtgattgagaggttcgagaaggaggctgccgagatgaacaagaggtcatt

SEQ ID NO: 90093 - DNA, 244 bp, Glycine max
  Clone ID: 700905259H1
caccaatttagtttgaagaatttggctgaatcactaaaaacactaggtaacaaggcaatgcaatctaagagatactctgatgcaattgagttgtataattgtgccattgcagtccatgaaaagagtgctgtttactactgcaacagggcagctgcttacactcagattaacaaatatacagaagcaatccaagattgtcttagatccattgagattgatccaaactataccaggcatacagtcg

SEQ ID NO: 90094 - DNA, 246 bp, Glycine max
  Clone ID: 700905260H1
ccggtcccttgtgatttgctcacaaaaccagtgtcggtcacaccatctctcccttttctccacctgcaacgatgtcacattaaggagtgccaccaacaccacaagggaaagaagcacaagctctggagacgcatcttctggggaatagtgatcttcgccttcatcgtgttactgacagttcttataatctgggcaatcctagagccttcaaaaccaaccttcatcctccaagcgtcaccgtttacg

SEQ ID NO: 90095 - DNA, 247 bp, Glycine max
  Clone ID: 700905261H1
cccttccattcactccacttcttaacacccccaaacagaacaacggcagagcaagcagccagaaaaatggtgttgctgtccaaagcaacaacagaacaatactcctacatcaagaactacatgccaactgcattctcctcaacaattcccatagtggacctctccaaacccgatgcaaagaccctcatagtgaaggcttgtgaggagtttggattcttcaaagtcatcaacatggtgttcccattga

SEQ ID NO: 90096 - DNA, 245 bp, Glycine max
  Clone ID: 700905262H1
tacaaaggggagcaccatggtgaacacagtagtgagtacaaaggagagcatcatggtgaacacaaagctggagagtaccatggtgagcacaagccagagcacaaagaggggttcctagacaaagatagagacaagatccatggtgagggcggcgccgccgagggcgagaagaagaagaaggagaaggagaagaaggagcatggccatgagcatggccatgacagcagctgcgcagtgacagtgat

SEQ ID NO: 90097 - DNA, 247 bp, Glycine max
  Clone ID: 700905263H1
gacaaaccagagaacacaggctctgcttaatttttgttgattttgtctggtctctacgttttgtataacaatttgaattgtacctggaaaaatcgtcgtgggtgagagttgatgctgggattctttgctggaaaaattggtaatgggtgaattatctgagattcggattatttttggtcaaatctacgttctataagtggaattacaatgcttgtttacatttgagttaaagaccctattttccttt

SEQ ID NO: 90098 - DNA, 248 bp, Glycine max
  Clone ID: 700905264H1
ggaattcatattgagtacatgttccctgatgcggttgaggttcaggcattagtaagaactaaggggctcttctcattttacgaggatgggcatcaagagtgctgtagagtaagaaaggtgaggcccttgaggagagcccttaagggtctcaaagcatggattactggacagagaaaagaccagtctcctggtactaggtctgaaatccctattgtccaggttgatcctgttttgagggactggatggt

SEQ ID NO: 90099 - DNA, 254 bp, Glycine max
  Clone ID: 700905265H1
gccatgggataggtagatccagctttcatccaagacctagaacacagaccaaagctctccataatccaagctgcaggaattcccataattgagctctctccagtatccaaccacacagtttcagatccatcttccattgaaaacttagtgaagcagatagggagtgcatgcaaggaatggggtttctaccaagtaaccaaccatggggtacccctgactctaaggcaaaacattgagaagcctcaagattgttc

SEQ ID NO: 90100 - DNA, 249 bp, Glycine max
  Clone ID: 700905266H1
gtacccgtcaagcaccggtattgacaagtgcgtcaagaaaaacatccaactctttctcatccagaaatgcggattctcagaatccgaagccttcaccctccgagttgatctcttcaaaacctacggaagcacccttgccggtttaagagcactaggccatgatatcaccgcagaggagtaccatggtttcgtgcacggaaggctaccttacgactccatcaaccctgatcatcattacggaacttctct

SEQ ID NO: 90101 - DNA, 246 bp, Glycine max
  Clone ID: 700905267H1
aaacaaaacaaggaacatacctaagagtttgcgagagagacagagagagatgaagtggagtccgaaccaagtctcatagctgagagtttaggatcggaattctgccaccgttcttcttcatctcacctacaaccttaacctcatattagcacaaaattagtttgcttctatgagccaactgtcgtgttttcttcagcttcataatggtcttgaagggtctatgtgagaggattgttcttcagaatg

SEQ ID NO: 90102 - DNA, 248 bp, Glycine max
  Clone ID: 700905268H1
caccaatttagtttgaagaatttggctgaatcactaaaaacactaggtaacaaggcaatgcaatctaagaaatactctgatgcaattgagttgtataattgtgccattgcagtccatgaaaagagtgctgtttactactgcaacagggcagctgcttacactcagattaacaaatatacagaagcaatccaagattgtcttagatccattgagattgatccaaactatcccaggcatacagtcgtctg

SEQ ID NO: 90103 - DNA, 245 bp, Glycine max
  Clone ID: 700905269H1
ggcatttccatgggacaacagcatgttgtcttggcagagaactgcttttcatttccaaccagagaaaaactggatgaacgatcccaatggtcctatgtactacaagggatggtatcactttttctaccaatacaacccgaacggtgcagtttggggtgacatagtttggggacatgcagtttcaagggacatgatccattggcttcaccttccactggcaatggtggctggacaatggtatgaca

SEQ ID NO: 90104 - DNA, 221 bp, Glycine max
  Clone ID: 700905270H1
atataatccgtgacaacagtggaaagaccagaaaagtgtgggaccatccctaacatcaccttcacagcttctaccgattgctgaaacaaaagactctaccagcaatagcctctgatttcttctttcagtttctttaggttatggttttctcagaagattgaacttaaacacgcacaccaagaacgacagacagatcgaagatgggcattgcagtgggacgt

SEQ ID NO: 90105 - DNA, 245 bp, Glycine max
  Clone ID: 700905271H1
catatttgctatggctccaatacttcatatatttaaatgaaggaatttagttcgaaagtggttgtcttctgaagagaatttttttttttttgttatcattcatgggtttttttgtagcacatgtagtgcaagggtcagcactagccctttttggtttatggcacaccatccacaccatcagatcttacctggtaaagggccctgcaaatttcactgtaagattctgggaccagtttaacacaacc

SEQ ID NO: 90106 - DNA, 241 bp, Glycine max
  Clone ID: 700905272H1
agtaataggacggccaagaaacatcagaaactcaactaccactgttcggtttagttgtagaaagacttaccgtgtttacattatatgcttatcttgggatcgaactgaaggagaacaaaaaaagaaagaggtaatctgtttattggaaatagttagatatggtataaagactacaaaggaaataattttttctgagataaatgtttttctgcattcacaatgccggactaggtatttgtta

SEQ ID NO: 90107 - DNA, 242 bp, Glycine max
  Clone ID: 700905273H1
caaatcttctatggaataatgggaagttggactgcttatctgattagcattctgtacatcgagtacaggaccagaaaagagaaagagagtgtcagcttcaaaaaccatgtcattcagtggtttgaagtgctggaaggtttactgggtccatactggaaagccattggcttggccttcaattgcacttttctcctctttggatccgttatccagcttattgcttgtgcaataacatatacctc

SEQ ID NO: 90108 - DNA, 244 bp, Glycine max
  Clone ID: 700905274H1
cgcgccgacatggctttcgcgcactacggtcccttctggcgccagatgcgcaagatctgcgtcatgaagctcttcagccgcaagcgcgccgagtcatggaacaccgtcagagacgaagtcgacttcatcatccgttctgttacgaacaacctcggaagccccgtcaatgtcggagaactcgtcttcaacctaacgaagaacatcatctaccgcgccgcgttcgggtctagttcccaggaggggc

SEQ ID NO: 90109 - DNA, 246 bp, Glycine max
  unsure (1)..(246): unsure at all n locations
  Clone ID: 700905275H1
atcgagccgaatcggctcgagcttcaacaccatggtggtcacctctgtctcactagtccacaacagagtgagtattaatcgttacttcaagatcaggataagctttttccttctgcttcatccccttccatggccgcaccttccctctcctccgctctcaactccctctcctctctatccctctccacctcctcatacttctctctcctccctcaacantccctcctctcaaaactatcaccctcc

SEQ ID NO: 90110 - DNA, 245 bp, Glycine max
  Clone ID: 700905276H1
cagaaagaaaaactcagcacaacacccctcccaaccctctttttctcttaatttctcatcatatcatatctattaatcttacacatatattaagacatagatataatttttttcgttttatttttccttgcatgggctgttaagataagatgtctcgcacgtgctcacagtgcggcaacaacggccacaactcgcggacatgcaccgacggtggcgccgccgcttcctgggcgggtctcccaggg

SEQ ID NO: 90111 - DNA, 245 bp, Glycine max
  Clone ID: 700905277H1
ataaaattggttctttatatacgtctctagctacataatcttctttcttcaacacacaagaatatatatatcagtgtggaggttaattaaaaaatgagcgataaagaagcgaatcttcaggcgaagttggaggcaacttcaacatgggctgttgcagttgtgtgctttgtcatgcttgctatttcaatcctcattgaacatattcttgaagaacttggaaagtggttacaaaagaaacaccaaaa

SEQ ID NO: 90112 - DNA, 244 bp, Glycine max
  Clone ID: 700905278H1
agagcttcgtatagcggacatactagaccgttatggtaaaccactatccttgtcgcaaattgtggagaacatagaagacgcaccctccccagatgcctctcttctccagagagtcctgagagtacgggtgcgcagaaagatcttcagtgcacaagaatcagagacaggagaaaccctcttcggcttgacacgagcctcgaagtggatccttcgcgacacgaaaatgacctagcacccatgttgc

SEQ ID NO: 90113 - DNA, 244 bp, Glycine max
  Clone ID: 700905279H1
attttgttctcaaagaaagaagactctgtctctgtctctgtatctgtctttgtctctgttcgtctcgctgaaggaatcgcttaggatcacattctttttcaagtttagttcctgcttctggccacctctcaagttctctgcttttgtttttagggctcctttggttctgaattggattggattgcaattgggtgcctcaccctgttttgctcaattgctgccactctactgttcatagaattgc

SEQ ID NO: 90114 - DNA, 246 bp, Glycine max
  Clone ID: 700905280H1
catgaattaggaatgaactataatttcatccgtccagacttgattgtggaatcatgcctacagactcctgaagatgtagacaagttgcgtagaattggagtgaaaactatattttgcttacaacaagattcagaccttgaatattttggagttgatattaatgccatacgagaatatgccaagacatgcaatgacattcaacacttgcgtgctgagataagggactttgatgcatttgatctacgg

SEQ ID NO: 90115 - DNA, 249 bp, Glycine max
  Clone ID: 700905281H1
gcgactctctttccttccctctttttccgaatctgaatcgaaatggcttcggagactgagacgtttgcttttcaggccgagatcaaccagctcctcagtctaatcatcaagaccttctacagcaacaaggagatatttcttcgaaagctcatcagcaatgcctctgatgctttggacaagattcgatttgagagtcttacagacaagagcaagcttgatgctcagccagagttgtcattcacattattc

SEQ ID NO: 90116 - DNA, 249 bp, Glycine max
  Clone ID: 700905282H1
ctcgagccgcccaaaaccatttatagggttttcttttctttgccaagaaaatgagagagtgcatttcaatccacattggtcaggccggtatccaggtcggaaacgcctgctgggaactctattgccttgaacacggcattcagcccgatgggcagatgccgagtgacaagaccgttggaggaggagacgacgccttcaacacattcttcagcgagaccggcgccggaaagcacggcctcgcgccgtctt

SEQ ID NO: 90117 - DNA, 247 bp, Glycine max
  Clone ID: 700905283H1
gcctccactctcatcttcatggacatcactcattcgaatgccttcttgattggaatcggcgtatgaatattgcaattggttctgctgaaggaattgtatcttcatcaccaagcaacaccgcatatcatccacagggatattaaagcaagcaacgtgttgctggattctgatttccgtgctcgtgttgctgatttcgggtttgctaagttgatccctgacggggcaacgcattgactacaaaagttaa

SEQ ID NO: 90118 - DNA, 245 bp, Glycine max
  Clone ID: 700905284H1
cctaaacgactctatctctcttcgttttgttcttccttgcgctcctcctcgttcgttcgttctccctcgcgtagatcggcaatggcggagaccgagacgtttgctttccaggctgagatcaaccagctcctcagtctcatcatcaacaccttctactccaacaaggaaatcttccttcgtgaactcatcagcaacgcctctgatgctttggacaagattagatttgagagttgacggacaagagc

SEQ ID NO: 90119 - DNA, 235 bp, Glycine max
  Clone ID: 700905286H1
ggttggctgaacaaaatggtacagtttaaagagaaatctcgcaaggcggtgcgttcattgctggagctgaagaagttggggttgcccttttgacttatcctgttctgatggcttctgatatacttctatatcagtctgattttgtcccggttggtgaagatcaaaagcagcatttggagttgacccgtgacttggctgaacgggttaataatttctatggaggaagaagtggaag

SEQ ID NO: 90120 - DNA, 245 bp, Glycine max
  Clone ID: 700905288H1
atcaactgcttttgcagttgccgtggaattggcgtgtattgtcatgtatgatgcctcgggagttagacttcatgcaggtagacaagcagaattgcttaatcaaattgtgtgcgaactacctccagaacatccttgttccaatgacagacctctgcgtgattcacttggtcatactccacttcaggttgttgccggtggcatattgggatgcattatagcatttttgatgagaagatcaagttaag

SEQ ID NO: 90121 - DNA, 243 bp, Glycine max
  Clone ID: 700905291H1
gagggtcagagtgagaaagagagagagagagagagaaactgagagaaattcgcaaaccctaatttcggaaagatcggcgatggctgcctccaaggatcgcgagaacttcgtctacatcgccaagctcgccgaacaggccgagcgatacgaagagatggtggaatcaatgaagaacgttgcgaatctcgacgttgaactgactgtggaggagcggaatttactttcctgtgggtacaagaatgt

SEQ ID NO: 90122 - DNA, 240 bp, Glycine max
  Clone ID: 700905292H1
tcactcttcttctcttgcggctagggttttagcgcacttcttctagatttaaggaagatgggtaaggaaatggttcacatcagtattgtggtcattggccatgtcgactctgggaaatccactaccactggtcacctgatttacaagcttggaggcattgacaagcgtgttattgagaggtttgagaaggaagctgctgagatgaacaagaggtctttcaagtatgctgggtgctggaca

SEQ ID NO: 90123 - DNA, 242 bp, Glycine max
  Clone ID: 700905293H1
caactcccatttctagctccctccctccctctgcttttcttctcttctcattttccttcgaacctcctaatctctccctccagcttctgggttctccattttccctcgttttctgcatctgcatttcgtagattcagttctcatcggaaaatggacgttcaccgaagacccattccttcttccggcgaacaccgacaaacccagaagctgaagaccaccaccaccacaccaccgattcgaaa

SEQ ID NO: 90124 - DNA, 241 bp, Glycine max
  Clone ID: 700905294H1
gtactctcccggatcctccgcctggaactcttgttttgccgcgctcgtgcttccgcttcggatccatctagcgtcacgaaaaaaatccagaattctgtgttcggttcagctcttttggatttgctagatccgaagcgcgaaccatttcgaagatcgttgaagaatggcatcaacggcgagtggggccaccggatggtacaggggaagagtgaaggcggttccttaccgggactgtttggtc

SEQ ID NO: 90125 - DNA, 243 bp, Glycine max
  Clone ID: 700905295H1
ttcacctttccttccttccacattcaatttccaacaatttcacgactccttcggagatctctctctcgcccataatccaaccatggcaaatacgggaaatttagacgcggcgatagagcaattgctgaacgtggagaagcagatgaggctcgccggtgacgtggcaggtaccagaaaggcggctaccgatattttgcagctctgcttcgatgcacgagcctggaaaacctcaatgaccagatt

SEQ ID NO: 90126 - DNA, 246 bp, Glycine max
  Clone ID: 700905296H1
ctctttgcaacacaacaaaaaaagacaacacagagagaagcgtcttaataaacgctcttctctgaaaaacctgatttcttctcttcttctcttctctttcgtttcgatcttcgatctctgaaaatgagagagtgcatttcaatccacatcggtcaggccggtattcaggtcggaaacgcctgctgggagctctactgcctcgaacacggcattcagcctgatgggcagatccaagtgataagactg

SEQ ID NO: 90127 - DNA, 265 bp, Glycine max
  Clone ID: 700905301H1
caaagatcccatcttttcacgatttggagcagaacaacaattctgggtatcttcatatctgtgccaatgagaccatccatggggtggagttcaaggactaccctgttcccaagagtggtgttttggttgctgatatgtcctcaaatttctgctccaagcctgtggatgtgtcaaggtttggggttatctatgctggggcccagaagaatgtggggccctctggtgtcaccattgtgatcatcagtcaggacctcattgggaatgc

SEQ ID NO: 90128 - DNA, 235 bp, Glycine max
  Clone ID: 700905303H1
agataattgagacgacggcgaacgagaacgctgtcgttgcgcgaactcgctgcgttgttgttggtggtgctagtcgcggcgagtgtggtggtgcaggctcatgagaactcggacgtgaagacgcttgtgaagcacatgcacgggaagaagtactgtttgaaaggatgggaatgtaagggctggtcaatttactgttgtaacctcactattactgattagttaccagacctacgag

SEQ ID NO: 90129 - DNA, 261 bp, Glycine max
  Clone ID: 700905306H1
cctcgagccgaatcggctctaggttgcacggcacagagtggagtcacaagatggtgtcctggacagctgcagaagctgctcgcagctagcgtcctaaagtgcggcaagggcagtgtctggcttgatccaaatgaagtcaatgaaatctccatggccaattctcgacaaaacataaggaggttggttaaggatgggtttattatcaggtagccgactaagattcactctcgctcccgtgctcgtcgaatgaaggaggccaag

SEQ ID NO: 90130 - DNA, 268 bp, Glycine max
  Clone ID: 700905307H1
caacctcaatcaatccacatttaaattataacaaacgcccttcaagatacaaacaatgtcatctcgcattgttgcggagaatgctctatcgctcaccaatattgtcacgcctccatatttcgacctaatggaactggacgatctcacgcgccgaacctccgccggagacatgcccacgctcggacagctcctcaagcacgtcggagacgtgcggaaggaagcctccggcgacggaagcgagacgcccgtgcaccacgctctcgacatc

SEQ ID NO: 90131 - DNA, 263 bp, Glycine max
  Clone ID: 700905308H1
attgctttgtaaatggtttggagcaccgagatgcaactgcaattttcaattgcttacgtgcatatgctgctatagataacactaagagtgcagaagaaatttttcgagttactgttgtggctccattgatacagaagattatcccacatggatcatcagctgtggttgctggatcatttggggatggtctagacgatgattatcaactaattaaggagttcattgataaagactgtagatttttattggacattacttcagct

SEQ ID NO: 90132 - DNA, 272 bp, Glycine max
  Clone ID: 700905310H1
gttgtaactcaagggttgctgtttttttcctcgtgacatgatttgatttccaccttcactcaagttctcttttttctttcccttcctttcatttatttattgtgcctatgtttctttaaattttaatttatagttttataccatgttatgttaatgtcatatgtgcgctctttcttatattttgtacaagatttgttgattcaattatctgagaattccaagtactttgttgattgtgatttgtgaagcaggtttcaattgggaatctgatg

SEQ ID NO: 90133 - DNA, 273 bp, Glycine max
  Clone ID: 700905311H1
cttcttcctcttcttcaccaacgaccaaggtggagagtactggttcccaaaagaagaaggaggagcttagaaaagtgttctccactttcgacaaaaacggcgacggattcataacgaagcaggagctgagggagtccctgaggaacatcagaatcttcatgacagaacaagaggtcgatgatattgttgtcaagtacgattccaacggggacgggttgatcgattttgaagagttttgcttgttgactagtgagtgtgtaggagtggatcatg

SEQ ID NO: 90134 - DNA, 281 bp, Glycine max
  unsure (1)..(281): unsure at all n locations
  Clone ID: 700905312H1
gatttcgatcatcgtttattgttgttcagagatgatcccgtaccttagacagtggcttctcntagcactagcatttccatgtttactaacacttcatctgttagtatcaggtgtagtagcaacaacatcgttcacactggttaacaaatgcgactacacagtgtggccaggcattctctcaaacgcaggagtcgccacgcttccaacaacaggtttcgtccttcaaaccggagagtccaaaaccgtaaccgctccaacctcttggggtggccgtttctggg

SEQ ID NO: 90135 - DNA, 273 bp, Glycine max
  Clone ID: 700905313H1
ttcgagcgaatcggctcgagggcaagcaacagaggctctttgatttcagtccgtacagaatattattcacagccacattacaaccacgtctctcttctcttaagtcttatctataaaataagaaagagaggaagctcaacctctcacaaactctctccacatccatctttgccacctgcatgttggttctctgtaaacagatactgcaaaagaagaataatattgaatatttggttgggttgaatcctgggttgaagcgttgcagacatcacg

SEQ ID NO: 90136 - DNA, 277 bp, Glycine max
  Clone ID: 700905315H1
acagcacgaggctattctgtcaaatgatatgcatagtgaagtgattatgtctagtggggcaattgggattcctcaattgctaatgcttagtggaatagggccaaaagcagaactccagaagttgaacatcccagtggtccttgacaacccctttgttgggaaaggaatggtagacaatcccatgaacacaatgtttattccttctaatagaccagttcatcagtcactcatagaaactgttggtatcaccaagatgggtgtgtacattgaggctagc

SEQ ID NO: 90137 - DNA, 273 bp, Glycine max
  Clone ID: 700905316H1
gtaagagccatacggtatcttatcccataggtcaccatgatccttccattagaagttgcagtaacgtgatagaaatggctttgagacgctttcttttatggctagctatatattctgaacccgatcccccctcacaagacttttaaatcacacaattgctgtgtttcgcacacgtggtagcaatgccaatttcacctgtaaaatgccttcctttggttgaccagccatacttgcatggaggaggtgtactttgttgtccaggcttcgacagag

SEQ ID NO: 90138 - DNA, 268 bp, Glycine max
  Clone ID: 700905318H1
atttcacaaaaaataaaaaaaaataagcctctttctctctctgaatttctaagcctctctcacaacaatggaggagccacaaccaggacccagcccgttacgcaaaatgattttggtgtcatcaatggcggccggtatccaattcgggtgggccctatagctctcccttctcaccccatatgttcaaaccctaggcgtcccgcacgcttgggcctcatttatttggctatgtggcccgatatctgggctgctggtgcagccattgtgg

SEQ ID NO: 90139 - DNA, 266 bp, Glycine max
  Clone ID: 700905321H1
aggtattattagtttttccgagcttagcaatgttcaggcagcattttcaggctttagcaattgtgtgaaagttcaatttaccatttgtggtgtttgtttgtgtaattaggtttatgtttacttaataaagcttcttaagcttcctctttttgtttttttactttattgattgtattttgccatatcttctgacctttatatatattttttgggctgctgaaactggtgcatgtaatgatttgatttggctagcaatgcaacgtatt

SEQ ID NO: 90140 - DNA, 267 bp, Glycine max
  Clone ID: 700905323H1
cagcttttatattttaccctttatctatttgttgatattgttttcatcccttgtgccttttcattccttggcgattacgaaattggggtttgatccagagagaaagagagagaaagacataaaatttaaggaagaacagagattgattttccataggaaccctaattttctctttcttgttcttttggggttctgcaatttgtgtggggttttgtgaagcggtgatcggaaagtctcgatctttgatcggttttcgtcgatggagag

SEQ ID NO: 90141 - DNA, 271 bp, Glycine max
  Clone ID: 700905326H1
gctttgattagtgtggcctagttgttgttttctcgatgagaaaggcttcttccactatgcattgcgcatttctgcgcttttgggttcccttgttgctgcttgctagcttcagctatgctccttctgtttcggccacaactgaaatttcagggaatgaagtgaacacagatgggaaggtgataaatgaagagttagcaaaaccaagtctaaaaggacatgatgaagaagcaaagttcaaaggattttttccaaaaccaattcctatagttag

SEQ ID NO: 90142 - DNA, 272 bp, Glycine max
  Clone ID: 700905327H1
acaacacatcacaaagactttctcaaacaaaaccagacggttgtctagtcttccaaccttccccatattcctattcctattcctattatatcaaaaacaatgaatagataacacttcttcttctttatatatatatatatatatgggtgtgttttttggtcgcttgcccgctttttgcacccttcagcactaagttagagacggccccctttccttgcagatctttttccagggaaaggtttggattttttgagcgttttgtgataagagtg

SEQ ID NO: 90143 - DNA, 275 bp, Glycine max
  Clone ID: 700905329H1
gtgaatacacaagcaaaattagattaattaattaagctgaaagcaagagaaaatgaagatggaaatcgaggaatttggcaactgcgaacacttcccctgctttcactgaaccacgtgtcccttttgtgcagatcagtgtgggagtctatgaggttttatgaggatgtcttgggctttgttcccatcaaacgcccttcttctttcaagttcactggagcctggttttacaattatggtattggaatccacttgatcgagaatcccaacattgatgg

SEQ ID NO: 90144 - DNA, 277 bp, Glycine max
  Clone ID: 700905330H1
ctctctcctcctcgatcccaattccactagggattcaattccgatgcgattccgagcttgttagatccacgccaacgtctcgtttgccagattcttttgtaaacaaaaataatcttcctttgcccaacaggtcagttggaaaaaaatggaccatgacaagactgggtgccaagccctacctgaaggtcctatatattgcatcaacaactgtggattttttggaagtgcagctaccatgaatatgtgttctaaatgccacaaagacatgttgctgaaa

SEQ ID NO: 90145 - DNA, 279 bp, Glycine max
  Clone ID: 700905332H1
catgtcctaatctttctgcaccatcgttctccatttttggctttacaaaaccactgtgtctgattaagggttctttaatatttccaatatttcttgtagtgaaaaagttgttagctaaaagaagaccaagtttttggtgttgtagaaggaagagaagaattaacatgaaaattcagtgtgacgtgtgtgagagagctccagtaacagtgatttgttgcgcggatgaggctgctttgtgtgccaaatgtgacgttgaagttcatgctgcaaacaagcttg

SEQ ID NO: 90146 - DNA, 263 bp, Glycine max
  Clone ID: 700905333H1
ctgaggcactgaaagtgtgatatggcaagagtcatttcctcttcctgcgcacgcctcgcaatgcgcctcttctccatcaccaccacagccaccgcgttcgccgtcactttacccaaaccctcatcactctccctctcatcgcgtcgattcctcttccctctctcccatgccatcgtccctcgctccacccgcgtcgccggaatccggtgccgcgttaaccgcgccggagactcggcgtactcaccgctgaactcggggtcgtc

SEQ ID NO: 90147 - DNA, 265 bp, Glycine max
  Clone ID: 700905334H1
aaccttactggcaaaacaatcacgctagatgtggagtcctccgacacaatcgataacgtgaaagccaagattcatgataaggaagggattcctccggatcaacaacgtttgatcttcgccggaaaacaactcgaagacggcagaaccctcgccgattacaatatccagaaagaatcgactctgcatttggtgcttcgtctccgcggagggatgcagatcttcgtgaaaaccctaaccggcaaaacgattacgctagaggtagagt

SEQ ID NO: 90148 - DNA, 195 bp, Glycine max
  Clone ID: 700905338H1
gaagtgagaaggctgtgcgatgcaccataagcatctcaactcatgtctgcgttttccgtaaaatgtaatatttgattattgagatttcttgtactaaaagtttgaataactaaagctaaattttttttccaagttgtgaaaaaaaagaaggaaagaaggaaagaaaagaaaggggggccgccgaaggatgggtgg

SEQ ID NO: 90149 - DNA, 265 bp, Glycine max
  Clone ID: 700905339H1
gttgaggccttacatggaatctatggttccactccccggaatctatgaccccgatttcattgctgccaaccaaggagaccgtgccaacaacgtgatcaagggcacaaagaaagaacaagttcaacaaatcatcaaagacattaaggagtttaaggaaagcactaaggttgacaaggtggttgtcctgtggacagccaacacagagaggtacagcaacctagttgtgggactaaacgacaccatggaaaacctctttgcttccttg

SEQ ID NO: 90150 - DNA, 267 bp, Glycine max
  Clone ID: 700905340H1
attcacgtaggcaacggctacgaaatccgtcgctataattcacccgtttggatttcaaacagccccattcaggacatttctctcgttgaagccacaagaaccggcttcaggaggttatttgactatattcaaggtaagaataactacaagcagatgattgagatgacagcacctgtgatcagtgaagtattacccagtgatggacccttctgtgagtcctcatttgttgtgagcttctatgtgccagaagagaaccaagcaaacccg

SEQ ID NO: 90151 - DNA, 271 bp, Glycine max
  Clone ID: 700905343H1
gatcgatcgatggctcttgtaggagttggactgaagcatgctgcggagggcgtaccggaggcgaattgctccgccaagcccaccaagcagggcgagggcctccgccactactattctctcaacatccacgagcatcagctccttcttcgccaagagagtcatgacctcaaccgtctcgaggctcagagaaacgacctcaattctagggtgaggatgctgcgcgaagaattacagcttctgcaggcacccggctcttatgtcggtgaagttg

SEQ ID NO: 90152 - DNA, 277 bp, Glycine max
  Clone ID: 700905348H1
atgcaatatatgggtttattgcccatctgagtttgggtgtcattctccagatatctaccagcacaaacatcaggaatgttggctgaaatatgctgagaaacctcgattaaattttaaggataagtatcctgaattatatcgaaattcacatccttctgcaccagtgatcgttccgtgggtctctggagttattagttcatgagtcaaataaccaaacaccagatgtaacgagatcagccagagctaccttgtagactacacaacggcacaaagctag

SEQ ID NO: 90153 - DNA, 267 bp, Glycine max
  Clone ID: 700905351H1
ggagaacaaagtatagagtgaaagaatgggttagagaagcaagatttggatcataggaggcaccggctacatcggcagacatatagtggaagcaagcgcaaaggctggaaatcccacttttgctttggtgagggaatccacactgtctgagacctccaaggcacaactcatgcacaattttgaggctttgggcgttaatttggtccgcggggatctgtacgatcatgagaagttggtgaaagctatcaagcaagtagatgtcgtcat

SEQ ID NO: 90154 - DNA, 263 bp, Glycine max
  Clone ID: 700905352H1
ctcagcttaacatgctactctcgatcattcatcagtgcatgtgtaaacaccctctctaggctctgcagcaagactagcagttggacagtggctttaaaaacacttattttcattcaaaggctgttatcagatggtgatcctgcatatgagcaagagatattcttctcaactcgccgcggaacacgcctcctaaacatgtctgatttcaggggcaactcaaaatataattcatgggacttctgtgcatttgtgcgcacctatgc

SEQ ID NO: 90155 - DNA, 265 bp, Glycine max
  Clone ID: 700905353H1
cagctctaatatggtgcagggttctagctttcttagttgcttgccaagctctacgcatagtgacattttatgctacgcagcttcctggtccaaactatcattgccgggaggggtctaaacttgctacactgcctcgtccggatagtgtctttgaagtcctcttgattaattttccacaagatgcgatatatggatgcggtgatttgatattttcatcacacatgatctttactctagtctttgttaatacatatcatagatacgg

SEQ ID NO: 90156 - DNA, 265 bp, Glycine max
  Clone ID: 700905354H1
cttcgcgccttattgtacatgaaagtatagcaacagaatttttgaataggattgtgaaatgggtcaaaaacatcaaaatttctgatcccttggaagaaggttgcaggctaggccctattgttagtgaaggacagtatgaaaagatattgaagtttatctcaaatgctaagagtgagggtgcaaccattttgactggtgggtctcgcccagagcatctaaagaagggattctttgttgaaccaactgtcataactgatgtaactac

SEQ ID NO: 90157 - DNA, 266 bp, Glycine max
  Clone ID: 700905356H1
tagactctgctctcaaacggcgtcgttttggaactctttttcttttccctttgattcttctctgtgcttgtaaccgaaagaggggaaaatataattaataccgatttcgcaaccaattcttctcttgcgttgaattgggacaacgagaaattttggatctcagtttttggcaggaaaaaaaaattgcatttgagtataaataacagagtgtagtgttcggtcttgttcttgatactgtgctagatttgttggatggcggagaaatc

SEQ ID NO: 90158 - DNA, 249 bp, Glycine max
  Clone ID: 700905357H1
gacacttttcttcttgggttgcaaagacacacaaagaaacattgatctcagtcctcactagtaacgcaattcatgctcttcgtctccgattcatgcgttaagccccttccgctgaagaagaaaaaccctttctctttatgtgttcaacatcaatggcttcctcgttctgcggctattccaaggcccaaatgtgcttcttcaagattctccgcataatttcatccatcccaccctccacacaacatacga

SEQ ID NO: 90159 - DNA, 270 bp, Glycine max
  Clone ID: 700905358H1
aaaaaaaaatagtaagtagaaggattaagaaccagaattagagttgctgtatgatatgtacgtttacggcgtgtgataaaaagatactatatagaactaaaggagattcccgtttcagttacattcaattcaacgattgaccagaagagaattcaggaaataacatttagatcacccaaattccaatatttctatgaagcagtaattaaatctaacgaatttatttcgattgattgtatccatatggggtaataataaaagggggaggag

SEQ ID NO: 90160 - DNA, 278 bp, Glycine max
  Clone ID: 700905363H1
aaagaatacaaaccttgtctttgaaccagctcatggatcttccaccccagttcatccgtctagccaatgatatgcctgagagcaccatagccatagacggtgtcactgtgcctctcatctcactgtctcatacatatcatctcacggtgacggcaatagctgaagctgctccatagtggggatcttccgtcatattcgcttatggtatgtctacaaacatcgatccaacgttcgcaagtggtaggtacggtagtctgtgccctccctcaagaagagaa

SEQ ID NO: 90161 - DNA, 274 bp, Glycine max
  Clone ID: 700905364H1
atgatagtaaccccctttttccctctccatacccttttgctttctttatccaataataagaacttcccacgagtggctttaactggtctggtctggtctggtcggacacacaaaaatattagtatggagaaggtgagttttgtgaagaatggagagcttagattgcctccggggtttcgtttccacccgactgatgattacgcggttttgcagtacttgaagcgcaaggtcttctcctgccctctgccagcctctatcattcctgaggttgatg

SEQ ID NO: 90162 - DNA, 266 bp, Glycine max
  Clone ID: 700905366H1
cgtcgctccgcaccagtttcagcgcacgtatatcttgttgtttggagcgatccgagaaaaactctgtaaacatgttggtttaccaggacctccttacaggtgatgagcttctctctgactccttccgttacaaggaaattgagaatggaatgctgtgggaagttgaggggaagtgggttgttaaaggagcagttgatgtagacattggtgcaaacccttctgctgagggtggaggagaagatgagggagttgatgatgcagctgtt

SEQ ID NO: 90163 - DNA, 264 bp, Glycine max
  Clone ID: 700905367H1
gacaggttcaaaccggagcaaaaaaacttgttacgatggtttcttccgacaaggatccacgagaggaagtccttcaagcatggtacatggatgatagtgatgaagatcaaagactcccccaccacaaagaacccaaggagtttgtctcgttggaccaacttgctgaacttggagtccttagctggaaattagatgctgataaccatgaaaatggtccagagctgaagaagattcgtgaagagcgtggctacacctacatggatg

SEQ ID NO: 90164 - DNA, 263 bp, Glycine max
  Clone ID: 700905368H1
gtagtacacaacacatagagataggaagacaaaacattctcactccgaacaaaatgtcgattaacagcgaatctacgccgccaccgctgatcggcaaaatcgggccttacaccgtcttcatgacgccgccgtctacacccaaaccctccgacgaccacctcgtcaccaccaagatcgcacctccgccgcctcagattcccaaagccgttccttcccccaaacccgtctccgaccccgacgattccgtcttacggcttcttcag

SEQ ID NO: 90165 - DNA, 263 bp, Glycine max
  Clone ID: 700905369H1
ggatgcacgtcttgaacgcaatttcaaggagatggataagttctaccaagaagccattgatgaacacatgaattctaagaaaaagactccagaggaagaggatttagttgatgtcttacttcaactgaaagagaacaacacgtttcccatagatctcaccaatgataacatcaaagcagtgctcttgaacttacttgtaggagctacaggtacaactgaagtcacaacaatctgggccatgactgaactaataaaaaatccaa

SEQ ID NO: 90166 - DNA, 256 bp, Glycine max
  unsure (1)..(256): unsure at all n locations
  Clone ID: 700905370H1
aaagtctttgactttgaagggaaagcctcattttgctgacttcagtttggtgccttatgattggggtggctttgtgcatccatgggttgaggcactggccatgagcagggttggtttggaggagcttaggctcaagaggatggtggtctcggatgagagcctggagctactttctcgttctttcacacactacagcggtctagtncttgttagctgtgaaggggtctgtancgatggccttgctgctatagctgca

SEQ ID NO: 90167 - DNA, 239 bp, Glycine max
  Clone ID: 700905371H1
taagatagaacgagaataatcaagacgacaacgttgcacttttgggaggtagaccgaggtaggtcgatggccatggagatttgtggtgaagtggaagagaccgtgaaggagtggaggcaatacttcagcactggaaaaatcaggagtgtgacatggaggaaaaaccagctcacagctctcttagagcgtgttcatgataatgaggatctatatgtaaggcgctcgatcaagatcttggg

SEQ ID NO: 90168 - DNA, 212 bp, Glycine max
  Clone ID: 700905372H1
ggaaaaggttcttcctgatcttccaatgagaatgtttcacaaggtttaaaagaagaggtacgagatgcaagattagaagttctagcaagcctaagacaagaaacagatgaagagcgcttgtcgtggaaagagctatctgcgttgcttagattagaatgtcgagagtacactccgttacttgcaatgattatggaatgtttagttcctaagag

SEQ ID NO: 90169 - DNA, 262 bp, Glycine max
  Clone ID: 700905374H1
gtgttctgggctttggctttagtgagcctctgtctgccaggtaccttccaatgcccaaggggtaacatctgtgccggcaaactcgccacctgcagccctagctgcaacgtcgccgtcttcgggcacgccaccgtcagtaagacgggcagcatcccgtcccagcacgagtagtccaccaactatttgccagccacctgcaattgtagctcccgaacctgctccagtgacagcacctgctccataatgtgcacgagcttcaagc

SEQ ID NO: 90170 - DNA, 153 bp, Glycine max
  Clone ID: 700905375H1
cttttagctccttatcgtcgtggaggacaaataggacgtttcggcgcagctggagtgggtaaaacggaactgattatggaattgatcaataacattgccaaagctcatggaggtgtatctgtatttggcggagtaggtgaacgtactcgtgag

SEQ ID NO: 90171 - DNA, 269 bp, Glycine max
  unsure (1)..(269): unsure at all n locations
  Clone ID: 700905376H1
acaaaagataaaaaatgggttcttctctacgganctgtctgatttggtgatcacttgcttctgcttcgttcgccgccaacccaagagcaccaattgatgttccatttggcagaaactatgttcctacctgggcctttgatcacatcaaatacctcaatggtggttctgagattcagcttcatcttggtaaatacacaggtactggcttccaatcagattggtcctacttgtttggtcacttcagcatgtacataagattggttgctggt

SEQ ID NO: 90172 - DNA, 243 bp, Glycine max
  Clone ID: 700905377H1
ccgtcatgggactcagtctcatatcattgtcatggactccattggtgcccgctgacttctcatctgcggtcactgctgcactctgctttaatcgctggagatctagttgttgttgattgtgtttcatccgtatgtgtcctacctgattctgcttcgaagacaagaccttgggtgttagggttcaggcttgttcttactgtcaataagctggacatgtgcttccttgaactcgaagtcgatgga

SEQ ID NO: 90173 - DNA, 273 bp, Glycine max
  Clone ID: 700905378H1
tataaaataatgttgttaccttcctctctctaacctacaatttaacaactccttcgtatcttctttcttttttctagaacctcaaaaccaaaaacacaacacaactttcgtaacgtgtctctcccttcttcccctcctctctccggttccctaattctgccctcactgcacccaattccaattcccctcacccccaattcggggaattagggtttcgccccattcattcatcgatgcaccaccaccatcgtcgctagggtttgcttcgatggc

SEQ ID NO: 90174 - DNA, 270 bp, Glycine max
  unsure (1)..(270): unsure at all n locations
  Clone ID: 700905379H1
tgaagaaagacacagccattgtttacttttcattgattgagccagatctttgtaggttctgctctgatnntccattgggtggaagaaagtctcaacctttattcgaaagagcaagtatctgagttgagttgagtgatcatgtgtggtggtgcggttatctccgacttcataccggcaggtcccgccagcggggcgcggcgcgtgaccgccgacatcctgtggccgagtttgaggaagcgcttctcgaagccgctgctggacgatgatttc

SEQ ID NO: 90175 - DNA, 275 bp, Glycine max
  Clone ID: 700905380H1
atttcctagcctcccaacaaggaggccccctatgctcaacagcagaaaataaataaagggcattggggtgcaatggccattgcaaagagtgcttccattcttattattttgtgctttgcattggcctgcaatgcggataatgctggaaaaccagacccagttgctggtcctgacatgttcagcaataaaaatgtggctaaggatgtgctccttcccggggagcaaatagttaacgtccaggattttggagccataggtgatggcaagttcgactg

SEQ ID NO: 90176 - DNA, 260 bp, Glycine max
  Clone ID: 700904709H1
gctttcacttcttcctctctgattcttctcattccttgccctctctcgctattgagcttttctttttaacacggaatacgaccaccacaaaagggttttgaggctttctatcactctaaagctcttagctcattcacctcttggtggtgtggtctattatgtaaactaccatttgtgcaattttttctcagatctatccaacttctcttttccatcctttactctgtttgcaaatcgccatcatcaccacttgatttgca

SEQ ID NO: 90177 - DNA, 261 bp, Glycine max
  Clone ID: 700904710H1
tttcaagaccaattgcactcacatgccatacctgaccataaagcagcagctggtgctatcagaggctatattaagttgaatgattctaacccaaagtctacagcagaggaagatgataatatgtcaaagttgcttccttctcagagaagaaaatgagacaaaagcagagaaaggcagaagcaagagccaaaaaggaggcagaagagaagaatgaagagtcaagtgccagtggggtatcaaagtctgggaagcggcacataa

SEQ ID NO: 90178 - DNA, 259 bp, Glycine max
  Clone ID: 700904711H1
atctcttctctctccacccaaaccccaaccaccgcccctgttccactctcgtatccgtcatgaaaggaggaaagtccaagaccgaatctaagagagccgatcccaaacttgctgtgaacaagaagggagccgccaccaaggcaggaaacccgccggcaaggggaaggcagcgaaagaccctaacaagccaaagaggcctccaagtgctttcttcgctttcatggaggagttcaggaaggcattcaacaaagaacatcct

SEQ ID NO: 90179 - DNA, 258 bp, Glycine max
  Clone ID: 700904712H1
gtcacttctggaatcttcgattacctgcaagagcgcgcaccaggaagcacgttgtatggtttcaaaggtggacctgcgggcattatgaagtgcaaatacgttgagctcacctctgaatatatttatccttatagaaatcaggcggctttgacatgatttgcagtgggagggacaagattgaaactccagagcagtttaagcaagcggaagaaacagctaagaagctagacttggatgggctcgttgttactggtggtg

SEQ ID NO: 90180 - DNA, 246 bp, Glycine max
  Clone ID: 700904713H1
atctcttcttgcttctatatattcttgctcctctctacttttcaattactctctctaccaaggagtgatggctgtgcaactgtgggaaaccctgaaggaagccatcgtggcctacaccggcttctctccttccaccttctcacggtgacggcgcttctttttgccgcctcactacgtcgtcacgggtctttttggttcatccgacgaccaccacgaccgccactgccacgcccacgaggaggagat

SEQ ID NO: 90181 - DNA, 224 bp, Glycine max
  Clone ID: 700904714H1
gttagaagtagtgaagaaaatgaaagtcattgttttcttcgttgctacaacaatttcaggtgcagaatggcaatgcaatgggtcagagcatgagcatgagcatggccacagctaccaaattttccctttgcgaatgaaaacggccccggtggccactacattccggaggtatccgtgcaaaagttggaggcttggtgtggaagcacacacgtcattgactggag

SEQ ID NO: 90182 - DNA, 260 bp, Glycine max
  Clone ID: 700904715H1
aactcatcatcaagggcttcttctgatcacatcaataataataagtcgacgaagcacaatgaaatggttcaacaccacaacatcaaaatgggattcatgggacaatcaaagccgccaacaactgaacacatagttgacaaaataatgaatcggaagcaagcagtgatgtcaacacaactcttggacattctaaatacaatgcttaccgtgctgccaccatggcgcttccagttgttccaatggatgaggtagccttgatg

SEQ ID NO: 90183 - DNA, 267 bp, Glycine max
  Clone ID: 700904717H1
tagagaccattcattgcactgatagcagcgatggggatcgatcttaaggctgggggtaagagcaaaaagaccacaagaacagcaccaaagtccaatgacatctacctcaaattacttgtcaagctttatcgattccttgttcgaaggacgacagcaatttcaatgctgtgatactcaagcgcttgttcatgagcaaggttaacaagcctccaatttctttgtcaaggttaattaagtatacgaaggggaaggaggataaattgctgt

SEQ ID NO: 90184 - DNA, 263 bp, Glycine max
  Clone ID: 700904718H1
aacggatctccccgttatagatctttctccctccctctacggcgagtgggacccacttctctgcgccgaggtcagccgcagcctcagggaaaccggcgcgctcctcgtcaaggaccctcgctgcaccgtcgaggacaacgatgcttcatcgacatgatggagcgctacttctcaaaaccccgcgacttcaaacaccgccatgagagaccccaattgcattaccacgttggggttacaccacagaaagcagaagttccaagaag

SEQ ID NO: 90185 - DNA, 257 bp, Glycine max
  Clone ID: 700904719H1
ttaagccaatcctgctcccggagccgcccagcccgacggcagcgcgtggcactcccgacatcttcgaatcaggtgtccacaccctcgtccgcacagccgttgtcatcggcaacggtttcccatcctccgagaatcacagtacggtttgctccgcgcccttggcctctcccacgaccacctcctattccgcgttacgaggccgagaggtggaatcgacgattggctccattggctttccctctctctgcatcgaaaat

SEQ ID NO: 90186 - DNA, 252 bp, Glycine max
  Clone ID: 700904720H1
attttacttgcctcctcaagagaaaggctactttgttttgaatgatgtttttagacatgttgatgaccaaggaatccaagggcctgctcatgatattggatctcctgcccctccggacactgtttccaatccttctgtgctgagacacaagtttccgagcaaatatctgcgacagctgaggatggtgatgaagaggcagtctatcaatcagaaaatggtcaagacgcaattgaagaagaggaagcacctgta

SEQ ID NO: 90187 - DNA, 256 bp, Glycine max
  Clone ID: 700904721H1
aaaagctgtggatgaggatcctgagaatgacctctatagaaagtccttgcaagcagccattaaggccccagaactacacatggagatccataaaaatgggcttggtctgatgagtaatgcgggatcctctgctacttcaaagaaaaggaatctaaaaggcagaagagcaatgactttaagtatgacatatttggatggactattcttgcagtgggcatagtagcatgggtgggaatggccaaatctaacattcccc

SEQ ID NO: 90188 - DNA, 253 bp, Glycine max
  Clone ID: 700904722H1
tatctctccctcactctcaccatggaggcgcaaccaccaaccccctcgactgcaccgcagcctctgccgccacacctcagctaccccgactccgtggaatcctcgcctcgctcccgcaacaccgactccagggacgagacttcgcgccggcgtccaccaagctccgtctcatgtgcagctacggcgggcacatcgtcccccgcccccacgacaagtccctctgctacgtgggtggcgacacgcgcatcatcgt

SEQ ID NO: 90189 - DNA, 248 bp, Glycine max
  Clone ID: 700904723H1
aatcactctagctgttgcaaatttctactatttttcaatggcttctgcagatgttgagttccgttgctttgttggtaggcttgcttgggtcaccggcaacgatgccctcgagaaagccttttcaatctacggcgacatgttgaatcgaaggttatcaacgaccgtgtgactggaaggtccagaggattcggatttgtgaccttcgcatcagagcagtcaatgaaagatgcgatcgcaggaatgaacgg

SEQ ID NO: 90190 - DNA, 257 bp, Glycine max
  Clone ID: 700904726H1
aatgaactgtcttcagaatctttctcgattctatgttttgcccttcgatacacttgttacgcgccaccgcaagaaccttcccctttccctgggtttcgtcaataattctcatcaaaatctaactatggcactcaaggctgctcaggttctataccgagtgcagacacaagtagtgccgataaggaggaagaaaagtctgagacatatagtcatagcatgacagaagccatgggtgctgttttgacttataggcatga

SEQ ID NO: 90191 - DNA, 105 bp, Glycine max
  Clone ID: 700904727H1
gtgagtgagtgagtagcagctagcaatggaaattactgccatggcttcttcagctactcctccacgaccttgtgttccaactccttccacttctccacacaacat

SEQ ID NO: 90192 - DNA, 256 bp, Glycine max
  Clone ID: 700904729H1
atcctttaccatcccggattctccctgccactacaaattcccccactcgcaaaccataggcagcagcagcagcagcaacaacaacagcaacgaagaattcgaagagaaatcaaatcgaatctcatttgatctgtgcgcgctgaggcggcggcaatggcggagcacttggcatcgatattcgggacggagaaggacagggtgaactgcccgttctacttcaagatcggcgcgtgcaggcacggcgaccggtgctcgc

SEQ ID NO: 90193 - DNA, 109 bp, Glycine max
  Clone ID: 700904730H1
cattgctcacgctctctgattggcctagccagtagtagccaatttgttggagctggttgggaatggcgtcgaaaccgaaatcaaatggaaattccaaatgcaacaaagg

SEQ ID NO: 90194 - DNA, 256 bp, Glycine max
  Clone ID: 700904731H1
aacgaatgaacaaggatttgggcatttgagagagatcatatggagaatactaagatgatgggggtgaagatacaggactatgcttctaatatggagagtaataattatccattctttgatttctctgaagatacacgctcttagggtttatggagctattgggtgcgcaagactatagtcctctccttgatttccctctatcgtcacacgtgtcagggcctcaaacctcttctgttaaggaaccacctgagactaa

SEQ ID NO: 90195 - DNA, 263 bp, Glycine max
  Clone ID: 700904733H1
atctcattaattaattcacaaactaacttagcttccaaattcatatggacctggcgacaaagatggtatcagagaggccagtggtgatattcagcaagagctcgtgctgcatgagccacaccataaagacccacttgtgtgatttggggtgaatccagcggttcatgagctggatgagatcccaagaggcagagacattgagcaagctctttcaaggcttggttgttctccatctgttcctgctgtattcatttctggtgagc

SEQ ID NO: 90196 - DNA, 239 bp, Glycine max
  Clone ID: 700904736H1
aacggttcgctggtccgtgcctaatgtgtttactggtggaaaccacattggtggctgtgactcaacaactgccctgcacactcaggggaagctggttcctctgctgatatctgctggagctgttgccaaatcaactgcttaaaggatctcccatttctaggttatgcagctaaataaaaataaaaacccaagtagttgggtcggctatataattcaggctccagaaactaatgtgtgta

SEQ ID NO: 90197 - DNA, 234 bp, Glycine max
  Clone ID: 700904737H1
attcagaaaccctaatttctcaaaatcttcagaggacacacagcacaaccacaacctccacagcctctcctacccaccggagccatggccgccgccgactcctccgccgctccatcgcaccagttgtcgcagagggagcggacatccagatgatgctcgcagccgacgttcacctcggcaccaaaaactgcgactttcagatggaacgctacgtcttcaagcgcagaaccgatg

SEQ ID NO: 90198 - DNA, 252 bp, Glycine max
  Clone ID: 700904738H1
gggactccctggaacaactggggctacttacatagactacttagtcactgatgagtttgtttcaccactagggtatgcaaatatatattcagagaagattgtacatctcccccattgctactttgtaaatgattacaacagaaaaatcaagatgtgttagatcccaactgcccacacaaccgacagacaaatggtctacctgaggataaattcatatttgcatgcttcaatcaactgtacaagatggatcct

SEQ ID NO: 90199 - DNA, 245 bp, Glycine max
  Clone ID: 700904739H1
cgacaaatggtaggaacaaattgctactcaaacccggcaaccctgaatgcatcaagtggtgctggctatgttaccaacattgctggtgttaattcctatgtcactggttcccctctctccgtgctcgtctgttttatgtctccgatacttttgggatcaatgcaacactttttagggacttggcagacaaggttgcaagaaaaaacgggtgttattgtgtctgtcccgacttcttcaatggggac

SEQ ID NO: 90200 - DNA, 253 bp, Glycine max
  Clone ID: 700904741H1
accacattcaaatccaaatggccctttacattacactaataattggcctcctagtaaacaccctagtactctataaatagcatttgcatgcaccttagtcttcaccaaaatactcctcttggcatcttgtgttgtgtcctcttttaagctatttccttctcttaacacaattggttgtgccaattgccatagtcaccaaccaattaacaaaggtatatatatcatcatatcatcaccaaatgaaaaatattgg

SEQ ID NO: 90201 - DNA, 250 bp, Glycine max
  Clone ID: 700904743H1
cacaaggcagaaagcaagctcatcctagagttttaaaaatggcagcagcctcctccatggctctctcttccccatccttggctggcaaggccgtgaagctgggcccatcagcccccgaagtcgggagggtcagcatgagaagaccgtcaccaagcaggcctcctccggaagcccatggtacggcccagaccgcgtcaagtacttgggcccattctctggcgagcccccgtcctacctcactggcgagttc

SEQ ID NO: 90202 - DNA, 262 bp, Glycine max
  Clone ID: 700904749H1
caaacatacaatggctgcagtgctctgggctttggctttggtaagcctctgcggccagctaccttccaatgcccaagcacctgcaactgcgccggcaaactcaccacctacaaccccagctccaacatcaccaccttccgcacgccactggcggtaacactacaaccacaagtggtggcatcccctcccaccacaagtacaccaacaactacaccacaaccacctgcaattgtagctcccaaacccgcacctgtgacaccac

SEQ ID NO: 90203 - DNA, 250 bp, Glycine max
  Clone ID: 700904751H1
agcgctccgctccggagcgatgagtgagagtgagaagcagagggtaacggggaaggtgaagtggttcgatgaccagaagggctctgcactcataaccaccgacgacagcggcgaggaattcttcgtccaccagtactcatccgatccgacggcttccgcagcctcgccctcggcgagtccgtcgagttccttactgactctgctcccgaagccgcaccaaggctgtcgacgtcaccggccctgacgaatc

SEQ ID NO: 90204 - DNA, 249 bp, Glycine max
  Clone ID: 700904755H1
aagataactagaaacagtgtgatgaaaatgaaggtccttgttttcttcgttgctacaatttcggtagcatggcaatgccatgcgtacgatatgttccctctccgaatgaacactggctatggtgcccgtactccgaggtgaaatgcgcaagctggaggcttgctgtggaagcacacaacatctttggctttgagaccattcctgaagagtgcgttgaagcaacaaaggaatacatccatggcgaacaat

SEQ ID NO: 90205 - DNA, 248 bp, Glycine max
  Clone ID: 700904757H1
acaaaggttgctgtaggagataagattgcagtagtgctaagtgctaacacctgcagtgaacaatggcctctgcatcagcatctctgctcaagtcttcactagttcttgacaagtctgagtgggtgaagggacaaaccttcgccaaccttctgcatcagttgtgagatgcaaccccaccaccccatcaggcctcaccatcagagctggttcctatgctgatgagctcgttaagaccgcgaaaacagtgg

SEQ ID NO: 90206 - DNA, 253 bp, Glycine max
  Clone ID: 700904759H1
acctagttcgcttgcagtcacacaagaggccaatactattcatagctagagatgggtgaagaagtgaaggtagttgttccagaatcagtgttgaagaagcgccacaacgacgaggaatgggcgttggccaagaagaagaactcgatgctgccaagaagaagagagccgagagccgcaaactcatctacaacagagctaagcagtacgctaaggagtacgatcaccaggagaaggaattgattcggttgaaacg

SEQ ID NO: 90207 - DNA, 220 bp, Glycine max
  Clone ID: 700904761H1
caacgcaagattggcagcgtcatcggccgcggcggcgacatcgtcaagcagctccgcgccgacaccaaggtcaagatccgcatcggcgacgcgctccccggctgcgacgagcgtgttgtcaccatccacagctcctccacatacccaatcacttcgacgagaccggcgatctcgtctcgcccgcgcaggacgcgctttttagggttcaccagcgcgtgat

SEQ ID NO: 90208 - DNA, 247 bp, Glycine max
  Clone ID: 700904762H1
gacaaggacaagctcgctgacaagttggagtctgatgaaaaggagaaaattgagactgctgtgaaagaagcactggaatggctggatgacaaccagagtatggagaaagaagattatgaagagaagctgaaggagttgaagccgtttgcaacccaatcattagtgctgtgtatcagagatctggaggagccccaggcggtggtggtgcatcaggcgaagaagacgaggacgattctcacgatgagct

SEQ ID NO: 90209 - DNA, 123 bp, Glycine max
  Clone ID: 700904763H1
attacgttatctcacgattctttgactgttctcccacaccacacagatgtttctcatcctgctccttattctcctatttcacgcggcggaagccaagggacagtggcagctactccacacaaa

SEQ ID NO: 90210 - DNA, 257 bp, Glycine max
  Clone ID: 700904765H1
tcccaattaggatcgagaaacattggtagcagcgagagcgctggtgcaggtgggaggccgaagcttgtgttgcaacctcggacactgtcagtgagcaatgaaggggacaatgtggggaagcctaaaggggttaatccgttcggagaggcgaggcgagggagcaggttttggcggagaaagggcaggattggaagaagattgatgagcagcttgagagcgtcaagactaaggagacaactggtggtggtggtgatggg

SEQ ID NO: 90211 - DNA, 250 bp, Glycine max
  Clone ID: 700904766H1
agcaagttattagattttttgctgggccatcgacatgaagccctattccgcagagctgagctgaaaacactcgtaaatttgcatggtaatgaggctggaaaagggggggaactgacacatgatgaaacaacgatcatgccggggcacttgaactcagtgagaagacggcgagtgatgccatgactcctatatctgaaacatttactgctgatattaattcaaagcttgatagggaactgatgaatgagat

SEQ ID NO: 90212 - DNA, 249 bp, Glycine max
  Clone ID: 700904767H1
agcttgctcgtttggttatggacaaatccccgcattcctacctcgccttctccggcgccgaagaatttgctaggcaacagggcgcagaggttgtggacaacgagtactttatcacacctgacaacgttggcatgtcaagctggcaaaggaagcaaacacaatcctgtttgattaccgaatcccaacatcggggtacgagacgtgcggatccggtgtggagagtcactgcaaatgaatggactcccaata

SEQ ID NO: 90213 - DNA, 251 bp, Glycine max
  Clone ID: 700904768H1
tacaagctagtttatcgtgaggagaacacgaagttgcttgtactctatgttgctgcagtagttttggtagcatggccacgccatggcgcaggctaccaaaggttccctatccgaatgaaaactggctatggcgacgttcttcggaggtaaaatgcgcaagcttcaggcttgctgtggaagcacacaacatccgagatattaaaaccattcctgaagagcacactgaacaaacaaaggactacattaatggc

SEQ ID NO: 90214 - DNA, 250 bp, Glycine max
  Clone ID: 700904769H1
atggggtcagaggtgtctaaacagatggagcgaagaaagacaatccagacagagaagaagagtctgtacgatctgaaaagcagcggagaagactaccctggctccgactaccgtccccaagacagaaaaaactgatgtcccatctcgaccctcagaaactccgcatcaaccaaatcgtctggcccggcacccacgactccgcaaccaaaaaaattggcatccctctcctcactcgccccttcgcacagtg

SEQ ID NO: 90215 - DNA, 252 bp, Glycine max
  Clone ID: 700904770H1
attcgctgccactgcaacagggtaacctaaagttctctctttatcattcttattccaataccacaataaactcctccacttttcactaacctacgcaactcctatcactatccgtgcacataaatgcaatcaataccctttttctctctcttgaaattaccttcttcctctgtaagagctgattagccaggatcactaatttaacagcaacaaatggccaccttcattttcaaatgcttctgagacattatt

SEQ ID NO: 90216 - DNA, 247 bp, Glycine max
  Clone ID: 700904771H1
agatcaatcagtggagctccccacttgaacatcaatcttgaaatgaactattggcctgctcttccttgcaatcttagcgagtgtcaagaacccttgtttgattacatttctcttctgtctgtgaacggcactcaactgcacatgtgaattaccaagcaaatggttgggtggcacatagtaaatcagatatatgggcgagaacatcagcaggtcaaggtgatgctgtgtgggccttgtggccaatggg

SEQ ID NO: 90217 - DNA, 168 bp, Glycine max
  Clone ID: 700904772H1
gcttattctagaactcgacggcacgccacccaccgctgaggacatagaagatgttacggaggagcaagagaaggtagaagaagaacaagaagatgatgaaacaattgaatccgatgttgagctcgagggtgaaacctgccagtctgatgatgatcctccacacaacat

SEQ ID NO: 90218 - DNA, 245 bp, Glycine max
  Clone ID: 700904773H1
gtcggtccttcgaagcattttataagcctccaatttcctgaactacacccaacatacaatctttcaagtacacctccccagcttccatttaagaacgccactcactagaataggccaatggttaagtcttctgattgtgtactactattactgcagacagaaggggttcctgtgggaatcacttttgttgaaaatgcagtggcaaaaggggctgtttgtttggatgggagtcctccagcttacca

SEQ ID NO: 90219 - DNA, 248 bp, Glycine max
  Clone ID: 700904774H1
atcaggcatgcaaactggaggacatagccagtatccctttctttccaagacatccactgttaactctaggttactacctcaaggtagtggtggtattataagtgggagcagcagtgccctggtgcatggagctgtgctccttctgctgctcggccaccaaaccttggttttagtgctgaacccacacctcaaatcccttcacctgttaaagctgtttctgccatacccgctgagaagcccaacctcca

SEQ ID NO: 90220 - DNA, 250 bp, Glycine max
  Clone ID: 700904775H1
tccagaccttaatttttctctcattcgcttcaaatttcaggaaatcaattatggctcaaccctcaacaagaataggccttgctggactggctgttatgggccaatatctagcactcaatattgctgagaaaggtttcccatttctgtttataaccgaaccacttccaaggttgatgagactgtagaacgagcaaaacaagaaggaaatcttccagtttatggctaccatgaccccgaagcttttgttcat

SEQ ID NO: 90221 - DNA, 247 bp, Glycine max
  Clone ID: 700904776H1
gtcgaggcatcggcacgcacgggattggtatcttacttgacggtctctatggaacagggacaggttccactgtttctgtggaaaatgtaggactccttggcctaacccgagttggaagtcgccgagttgttaaatttctgctggttttatgatattcttctctactttaggaaagtttggagctgtgtttgcatccatacccttcccaatatttgctgcattatactgtgttctctttggccttgtt

SEQ ID NO: 90222 - DNA, 138 bp, Glycine max
  Clone ID: 700904778H1
cacacatatattgctttgtttgctagcttgtagtagtacgaattgcaggaggccaaatacaactctagagtaatatacttgtaggtagatgtagtgccccgtaaccggtcgtaaggccgagaatagtcaacgtttcca

SEQ ID NO: 90223 - DNA, 248 bp, Glycine max
  Clone ID: 700904779H1
gctccaatattccagttgggcacttctcaaaactgcacaagaagaagaagcttcaaccccaggaataagcacggtttctaaaatgttttgcaattttcacattattcttctaattgctcttgcacttttggtacaatatcatctcagcttggctccaaggtagaagtgcttcctggctttgaaggccctcttccttttgaactggaaacagggcacgctggattaggagaaaaagatgatgacatgca

SEQ ID NO: 90224 - DNA, 249 bp, Glycine max
  Clone ID: 700904781H1
aggctcgagaaggggccagattattgagcagtgtaggagatccaaagttgggaagctgttggagtgtgattttggggagagtaagtgtcattcccctagtagtataatgcagatgtttcaagggtcgcttttcttcttcagcctcaaggggattcgtataccagaagatctgcttttgattcaatgctggctgggcgtataccagtgttcttccatccgggttcggcgtacacccagtatacatggcat

SEQ ID NO: 90225 - DNA, 231 bp, Glycine max
  Clone ID: 700904785H1
aatgaatccaaaagcagagaatgcatggcaatatttgagaatttcattgagctgtgcttctaggaatgacatgttggaagcttgtgatagtcgtaatttggaccttctccagaaggagtttccactacagtagggcgcgtttgagtgaacagcttaatcaagcgcttagtgaataagtacttatcatataagcactattgtataagatttttttttttaataattgaagag

SEQ ID NO: 90226 - DNA, 250 bp, Glycine max
  Clone ID: 700904786H1
agcaagtggatcgccgaacagacccacgccaatcgccaacgccgcaccgaagaggtttctcgcgagttcgctcaggagcaagagttctttcgccaaaccgctctcatctccaaaaaagagaaggaaaaggtgggctcatgcaagctgttagtttcatgtacgttcgtactccgggctacaacgccgagagtgccaaagctgctgaaatgaacgacgagaagaaaaaagaggacatgagcaaggggcttag

SEQ ID NO: 90227 - DNA, 249 bp, Glycine max
  Clone ID: 700904787H1
gcctcgctctgtttctgtatctgtgtttgcggctgaggattccgaacgagcgaccttcttcgtttctcgcaaagtttaagtcatcatgggtaaggaaaagactcacatcaacattgtcgtcattggacatgcgactctgggaagtacaactaccactggtcatttgatctacaagcttggaggtattgacaagcgtgtgattgagaggttcgagaaggactacgctgagatgaacaagaggtcattcaa

SEQ ID NO: 90228 - DNA, 142 bp, Glycine max
  Clone ID: 700904789H1
caaagtgcttctgtcctctgtgtttttctctgtcttgctatcattttggctagtggcactgctgcaagtgcaactccaagaagcgcagtgcaaagccaccatgtttcaacattcaacagaagcatttttcatccacacaaca

SEQ ID NO: 90229 - DNA, 247 bp, Glycine max
  Clone ID: 700904790H1
atcaggagagtatggagctttacaacaccaacaaacaagcacatttgcatccttagaatttcatgttaaactgagtaaaaagaaatttgaaataaaatgcaaaacataaggttgaaatgtgcttgtttgtttggcattcaggagagtatggagctttagtgctttacccttttttccagcagatattctcgcttaaccttccagtcttcttcagctaatgaccgatagaaaagcctaaataagaact

SEQ ID NO: 90230 - DNA, 247 bp, Glycine max
  Clone ID: 700904792H1
attgaattggtgatgaagtttttatacgtacaaatacaagcgagtgtcttgtgatgtaatgacactcttatgttgaagccaatgtttataaataactgaattcacaaactcattacccatgtgcagtagcactaagacaagcgacgagtttgtgtgcaacccttttaattaatcaacgtctactgattgataacatgtatttgggactactagtacttgaatgctctggtttgttgcatcaaaggca

SEQ ID NO: 90231 - DNA, 249 bp, Glycine max
  Clone ID: 700904793H1
ttaatatttcatcatttttttttcctttgaaaccagccaagagggttatttttgatccctcaaagctaatttctcattttcttttccgggactgaagaggttgtctatttgaaatctccttcatcctttccttattgttgaaaagtttttgtttttgttttaattaaccagcagttactcagttttagaaagacgcaggttgaatcatcatggcagctatgatggatttttacagcagcagcacagagt

SEQ ID NO: 90232 - DNA, 250 bp, Glycine max
  Clone ID: 700904794H1
atttgggggcgagtgatgtgcgaagtgagggagatgcagtagaatagtaatagtggtaacaaaaggcaacagagaacagaagagaaaggaaaagagagggtttggtgagttacccaagagaaaggatgaagaagagcgccagcagcttggttccaacgcaggaacctcaagctgcggttattcaagcggaaaatcgaatctttgggaggaagaaggaggcatggacgagcttcttgcagtggtgggttaa

SEQ ID NO: 90233 - DNA, 246 bp, Glycine max
  Clone ID: 700904796H1
ccacttgctagattggttgtactgacactactagccaccacgtttgtgctctgctccacttcgcactctccgccatcatcgtcatcatcatgcaagcgcttcattcccccaccctccgcacttctcccttggacctcttcggggccccaacaatgccgccgccaagcgacgcgcctcctctgccaagcgcgtgttcttcgtgtccgccacggtggcgccgaagctgtccgctccgcagcggcacaa

SEQ ID NO: 90234 - DNA, 120 bp, Glycine max
  Clone ID: 700904802H1
atcaactctttcaaaagggagaagaaaaggaaaggaaacaaaacgcacaaaggattattatagcaatggcagaacaaaaccaaaaccagacaactgaagctacaaggcaccaagaggttg

SEQ ID NO: 90235 - DNA, 262 bp, Glycine max
  Clone ID: 700904804H1
atgcaaaacaccccataaaaaaaatgatgcatctaagcttatattttaccgttgttgccatagcgctcctattttcatttacatcttcttcagcagatactcatgaaaactttgttcaatgtctttataattatcccaatagcggaacctcaatctccaaagttgtttacacccagaccaactcctcatacacgtctacactagattcttcaattcaaatttctagggtcttaaacgcaagctcaaaacccttgtcattgtg

SEQ ID NO: 90236 - DNA, 279 bp, Glycine max
  Clone ID: 700904805H1
ctaattctccaagaataagagaatccaaaagtctctcaaaaaataaccatgatgatgcatgtcctttgcttctcagtgttcctagcagcagcaatgcaaggaacactggcggttgaatacagtgtcaccaacaacgccctctcaacccctggtggtgttcgtttccgtgatgcaataggggacgaatacgccaaacaaacacttgactcagccacccaattcatatggggggccttccagcaaaacgctcctgctgatagaaaagatatacaaaaaata

SEQ ID NO: 90237 - DNA, 282 bp, Glycine max
  Clone ID: 700904806H1
agcttgtttctaagaaatttcgtgggtctaagaaaaagaataaacacaatgagggtgagtcaggtagtgaaatttcaagtgctgtgggagaagaaaagttaccaattttagaaattgaagaggaagaggaggaagagaatggggataataagtcaagtaacactaaacctgattgcggaatcacttgttcctatgagaagaaagtgaatagagttgagaattcaggttcttccatggttttagttatgattattgcccttgttgggcttcttttgggtcgtt

SEQ ID NO: 90238 - DNA, 281 bp, Glycine max
  Clone ID: 700904807H1
attttctctcttctctgcttcttcttgttcaaatcttaggagctgaggagaatcaatcgagagaaatatgtctggtatcgctcgtggacgccttgctgaggaacgaaagtcatggcgcaaaaaccatccacacggtttcgtagagaagcccgagactctacctgatggcaccgtaaatttgatggtctggcattgcactattcctggcaagaccgggactgattgggagggtggatatttcccactgacaatgcacttcagtgaagattaccctagcaagc

SEQ ID NO: 90239 - DNA, 277 bp, Glycine max
  Clone ID: 700904808H1
tacaggtttcatctgatgttaacatgcaaaaggaagaagatgaagaacttcgctttcctaatcaccctgtatgttattttttttccttggcaagatattagtgaaaatgtttctttacttttgtgattttcttatgtgcttgatgtaaccgtatatattataatatccttactggaaatatcaaattctcttcagcttatcgtgagagacgggaacagaaggctaatgcaagacataggtaagcaaaacaaagtattttggatgctttattaggtta

SEQ ID NO: 90240 - DNA, 72 bp, Glycine max
  Clone ID: 700904809H1
ctcctgctccttattctcctctttcacgcggcggaagcacggggacagtggcagctcctccacacaacatac

SEQ ID NO: 90241 - DNA, 275 bp, Glycine max
  Clone ID: 700904810H1
taaaatcatgtgattatagaacattggctattggtgatggtgggaatgatgtaaggatgatacaacaagctgatattggtgtgggcatcagcggcagggaaggattgcaggcagcaagagcagctgattatagtattggaaagtttagattcctgaagagattaattctggtccatggccgctactcttacaaccgtacagcatttctttctcaatattcattctataagtccctactgatatgcttcatccaaatccttttttcatttatttca

SEQ ID NO: 90242 - DNA, 272 bp, Glycine max
  Clone ID: 700904811H1
cctttgttcactcttcttctcttgcggctagggttttagcgcagttcttctagatttaaggaagatgggtaaggaaaaggttcacatcagtattgtggtcattggccatgtcgactctgggaaatccactaccactggtcacgtgatttacaagcttggaggcattgacaagcgtgttattgagaggtttgagaaggaagctgctgagatgaacaagaggtctttcaagtatgcctgggtgctggacaaacttaaggctgagcgtgaaagag

SEQ ID NO: 90243 - DNA, 268 bp, Glycine max
  Clone ID: 700904812H1
cccaaaccctcctccattcccagccatctctctctttctctctaaaaccaagtctcgtttctctctcctcttgctgggcctcttcttcgggcttcccggcccatcgccgtctccaacgccacaaccttcttctgctttttcgatttagggttttcgcgcgctctcccttccttctcctggatctgctaggagaagcgctgaatgctctgagcttcaacgctgtttgttagatatggcgtcttcgtatcccggttccgttagtgccgca

SEQ ID NO: 90244 - DNA, 276 bp, Glycine max
  Clone ID: 700904814H1
ctcgagccgaatcggctcgagcggctcgagaagccttgctttctacttcacttcaaactagccaatctcgaagatggcaacagaattggcatctcccaattgggttccaaccgcagccgcatgtttggcagccttggccgccctcctcctcttcctcctccgcggtctccgccgccgtaaatacaatctccccccaggccccaagccctggcccatcataggcaacctaaacttaatcggctccctcccacaccagtcgattctaacgctgagtaa

SEQ ID NO: 90245 - DNA, 280 bp, Glycine max
  Clone ID: 700904815H1
gtgacataactggagctataaagaacagcaatggtcttgacatcccaagcctacttgagcattccaaagtgcacaggggagtaaaaggattcaatggtagtgatccaatagaccctaactcaatattggttgaagattgtgatgttctagtcccagcagctcttgggggtgtcatcaatagggaaaatgcaaatgaaatcaaggccaaatttattgtggaagcagctaatcacccaactgacccagaagctgatgagattttgaagaagaaaggggttgt

SEQ ID NO: 90246 - DNA, 272 bp, Glycine max
  Clone ID: 700904818H1
attaattgcaagaatggcacttcgttgcttggtgatgtccctttctgttctcttcactcttggtcttgcgagagaaagccatgccagagacgaagatttttggcatgctgtttggccaaacactcccattccaagttcattgcgagatcttctaaagcctggccctgcaagtgttgaaatcgatgatcaccctatgcaaattgaagaaacacagtacccgaaaaccttcttctataaagaagaccttcatccaggcaaaacaatgaaagtac

SEQ ID NO: 90247 - DNA, 88 bp, Glycine max
  Clone ID: 700904819H1
gtgatgcccaaaccgagaccacttcgaaagagcgaaacgcagtgttagcattgttcctcaacaaaaaaaaaataaaaggaggaaaaag

SEQ ID NO: 90248 - DNA, 136 bp, Glycine max
  Clone ID: 700904820H1
tttaacgttaactagtaactagtaacctcttagcattgaatttccgttattaatttaatcgatttgaacgtaattagtagctttgaagttttcttttattatatgagtagcttttattaaaacttgagattcactt

SEQ ID NO: 90249 - DNA, 276 bp, Glycine max
  Clone ID: 700904822H1
ccctcaccaccaacgccaaacaagccctaaatctctcttctctttcttcttcttcctttaaccatgagagagatcttgcacgttcagggaggccaatgcggtaaccaaatcggttccaagttctgggaggtgatctgcgacgagcacggcatcgatcccaccggaaagtacaacgaggaaggcaacagcagcatccaactcgaaaggatcaatgtgtattacaacgaggcctctggcggaaggtacgttccccgtgccgtgcttatggatctcgaa

SEQ ID NO: 90250 - DNA, 280 bp, Glycine max
  Clone ID: 700904823H1
aaaacatctaacaaatgaccttaaagatacatttacccttattgagttttgcctatgtcttatgacttacgcacacaacaataaaagtttgaattttcaacgaaggcgtccaaaccccaaacctacgcattttttcttttccccaaccaacagctcctctctttatgttcttgtaaattcttttggctaaagtttcagctttcagaattgaaaaaaaaaatgatcaaacaggttcttcttgttctgctcttcttggcctctggattgaccctctcagtct

SEQ ID NO: 90251 - DNA, 274 bp, Glycine max
  Clone ID: 700904826H1
atcttaaaacgtattgggcactggccgccattttgaattctggttgagggattgaagtgcgattataggtggaggaggatggcttgtaggggatgctgggaatgccttttgaagcttttgaacttcatattgacccttgctggtctggccatggtcggctatgggatttatctgtttgttgaatacaataaaactccggataatactctcactgtcggtgatgatcaaactctagttcaacttggccgacccatgctagtggctgtgtctctgt

SEQ ID NO: 90252 - DNA, 275 bp, Glycine max
  Clone ID: 700904827H1
gtcaaacagtcggtaactctttcttttcttttctttctttctccgatcgcatcgctcgcaaccacaatcatgccttcccgaagaagaactctcttgaaggtcatcattctctgtgacagcggggtggggaagacgtctttgatgaaccagtatgtgaataagaagtttagtaatcagtacaaggcaaccattggagcggattttttaaccaaagaagtgcaatttgaagataggcttttcaccttacagatttgggatacagctggccaagaaag

SEQ ID NO: 90253 - DNA, 275 bp, Glycine max
  Clone ID: 700904828H1
tctgaatggagagcgaggtggtgtccattgcagttttctaatgaaaacaacaaaatagacacctgttaagaaggaggacaacgatggtgctgccgctatttactgctttcattctctttgcttttattccgaatggattgttagcagttccttccaccgtcccggcattcctttggtcatcacattatgaactggcctctgaaaatatattgaaggaatctgtaaattaccaagtcatttctccgaaggatctagcaaaatctattttatctgaa

SEQ ID NO: 90254 - DNA, 272 bp, Glycine max
  Clone ID: 700904830H1
gaagaaaaggcgaagatcaaaatgactccagctgctgggttcagaggttatcaaaggcttggagaaaatataactaaaggtgtacctgacatgcatgaagctattgattgctatagagaagtgaccaaggacatgtatggagatcttggcaaagttatggaaggaagcaatcaatggccacaaaatcctccaacattcaaagttcttatggaggagtatgttagtctctgcagagaccttgcaaggaaaattatgcgtggaatcgctttagc

SEQ ID NO: 90255 - DNA, 178 bp, Glycine max
  Clone ID: 700904834H1
gactgaggttgggtttggaaggcaagggcttgtgttgtcacaatccaagagagaagtaatggcgaacatagacatcgaagggatcttgaagcagcagcagccttatgatgggcgcgttccgaagacgaagatagtgtgtactttgggccctgcttctcgatccgtagaaatgaccgag

SEQ ID NO: 90256 - DNA, 275 bp, Glycine max
  Clone ID: 700904836H1
gcgacttcgatctccggcaatctaactaaaacggcggcgtatagcgggatctgcgagcatggagggtgagaacgcgagcaaggtgatcgaattggtgaacgagatagccagcatctccgagtacaggcctccggtgaagaagcagtactgcaacttggcgcggaggctgaagcttctgatcccgatgttcgaggagattagggacatgaacaaagacgcgcttcccgaggacacttccaacgccgtcctcgccttcaaggaagctctccaatccg

SEQ ID NO: 90257 - DNA, 274 bp, Glycine max
  Clone ID: 700904839H1
cagagtttcccgccctttgaggggggaatgtcagcttccttggatacatctgatcatacatcagacgttgagagtgaaagaacaaatggaaaaccaaagaataagcttcctcgtcctcgtaatcctctaattgatgctattgctgctcatgacaaaagcaagcttaggaaggttactgaaagggttatgcctcaaattgcaccgaaggtagatgaaagagattctttactagaacagataagaacaaagtccttcaacttgaagcctgctgtga

SEQ ID NO: 90258 - DNA, 270 bp, Glycine max
  Clone ID: 700904842H1
gagaaagtgtaaagaagaggaattatctgcatcaatcaaccatcatcataatcatgtcttgctgtttatcttgctgcgcgtctttgacctgtggtctctgcacctccactgcatcttgcatagcccaaaaatccgctagaatcggttactgtggtctcttcggtgtctctctcgtcgtttcgtggatcctcagagaagttggagcacccctcttggagaaattcccatggataggtggcacatccgataccaacacaacggggtggtatc

SEQ ID NO: 90259 - DNA, 268 bp, Glycine max
  Clone ID: 700904843H1
accagagcgaatccttttcttctcccttgttttgaacaccgtctgtggatacccttttgttaaagccaattgttttctcagatttgaggacaaggaggtggtgggggaggagataatacagggagaaaaacataatagagagaaaaataaaagcacaaacgtgaggctcttgttgaaaacacacaattagatataccagttgtcaatttgtcatatctgaaatttctcaagttgtgtttgtttgtcgtagaattgtagggtcagctgc

SEQ ID NO: 90260 - DNA, 269 bp, Glycine max
  Clone ID: 700904845H1
aaatcttatcttagcaatagctacccctatcacaacaatactatggtaggcaaaaacaccaaatgggagaggaaaaagagcagcctaagagtgaaaccgagaagaagcccgaggaggccgccgcagcccccaagaaagacgacggacccatccctgtcgtttacaaactcgacttgcattgcgagggatgcgtcaagaagatcaaacgcacatgtcgccacttccaaggtgtggaaaccgttaaggcagatctatcgtcgaacaaagtg

SEQ ID NO: 90261 - DNA, 269 bp, Glycine max
  Clone ID: 700904846H1
ccaaaacactgccttgaagacatggggaggccgcccagagaacgtgaaggcagcacaagatgcactcgcattccgtgccaagtccaactcactcgctcagcttgggaagtacactggtgagggtgaatccgaggaagccaagaaggagttgttcgtcaaaagctactcctactaagatgtttgcagtgaatatgatacttgttaggcagcaacaccagcagttacagtaggtgttgacggacgatgaagtggaagactaatttgtctaa

SEQ ID NO: 90262 - DNA, 271 bp, Glycine max
  Clone ID: 700904847H1
gtgatacttgagaagaaggatacagaagtgatagaagagaagaaggaaagtgttgttcctattagtccagaggaagttgagatacggggaattcccctgcttggggacgagaggagcgatgtgattctgctaaagtttctccgggccagggatttcaaggtgaaggatgccttgagcatgctgagaaacacggtgcgttggagaaaggaattcggaatcgagggtcttgtcgaggaagatcttggaagtgattgggacaagtggtgttcat

SEQ ID NO: 90263 - DNA, 168 bp, Glycine max
  Clone ID: 700904848H1
ctgagatgatgccccctgagcaagaaacaactattgcaacaaacattccagccatcacaacccgacaagcgaccagctcggtccaccatgaatcagagggttcaaacactaacaaaatcaaaccaagtttagaattggatgataatggacttcctccacacaacatac

SEQ ID NO: 90264 - DNA, 257 bp, Glycine max
  Clone ID: 700904851H1
gtcctctgttgctgtcatgttttcaattgctgtttatggtgtccatagggtgcagtagtgtctgggctcatcttggtgctgccctcttgttgggcttgctttggatgcaaagcacttacgtgggtcatgactctggccactatgaggttatgtctagccctggctacaacaaattggcacaaatcctttgtggcaattgcatgactgggataagcattgcatggtggaagtggactcacaatgctcaccacatctca

SEQ ID NO: 90265 - DNA, 268 bp, Glycine max
  Clone ID: 700904855H1
ctcgagccgttctcttaggtttccgcaagatctgcaaactttggcttccaggaaattcgagaaggctcactccggcgacggcgccagtccaggcaaaatcttcattggagggttagccaaagacaccaccctagagacgttcgtgaagtactttgagaagtacggggagataacggactccgttataatgaaagaccgtcacacgggtcggccaaggggattcggcttcatcacctacgccgatccctccgtcgttgaccaagtcatt

SEQ ID NO: 90266 - DNA, 271 bp, Glycine max
  Clone ID: 700904856H1
ctcacgtcgcctcattccctggggtctgaatgaggggatttatttgaatgaagttgatcgagttctacgtcctggtgggtattggattctatcagggccacccataaactgggagaatcactggaatggttggaagaggactcgtgagagtctcaaagaggaacaggatggaattgagaaagtggcaaaaagcttatgctggaaaaagttggtgcaaaagggtgaccttgcaatatggcagaagcccaccaatcatattcactgcaaaatc

SEQ ID NO: 90267 - DNA, 265 bp, Glycine max
  Clone ID: 700904857H1
gttatgcaaatgatgtccaagaccatattgactatggaacttctggaaaagttgctggatttatagctgaaacaatgcagggagttggaggagctgttgaactggcaccagggtatttgaaacttgtttatgacattatacataaggctggtggtgtctgcattgccgatgaagttcaaactgggtttggtcgaacaggaagccattattggggatttgagacacagggtgtcattcctgatatagttaccatggcaaagggtat

SEQ ID NO: 90268 - DNA, 267 bp, Glycine max
  Clone ID: 700904858H1
gatttttcaagctctaccctcccttccctccactttcctccctcttcttcttttgcttctgtttttgaggcgaagaaggatggaattgtaatgctgggaatataattggagaattgggggaggagtaagggaggaaatcatacacaatgcccgagttccccttgagctcgaggttggaaagggtgcaaaatagcttgagagagaatggttctctggtgtatctcaatgtgtatgatcttacacctgccaacaattatctttacgcct

SEQ ID NO: 90269 - DNA, 267 bp, Glycine max
  Clone ID: 700904861H1
gagtaacctctcaatcctagcttcaattatattgattttttcacatttctaaatccatttctaccatatccttctccctctaattaaacctctctatccatatctaaaatttcaaaaagatctcaattaattagatttccctctctcctcctctctctaactatattgcaaacctttccctctgctttcaaaatcagcaaattcatgggtcttagagacattggtgcttcactgcccccagggtttcggttttacccgagtgatgag

SEQ ID NO: 90270 - DNA, 266 bp, Glycine max
  Clone ID: 700904862H1
ctcaggatgaggaagaaggatcagttattgatgaagaggttgctgaaccccctacagatttaagtcagaatgatattgttactgttgatgattcaacttctgctgtcctggatgatgcaccaaggagatcatatgcagccattgtcatgaaaagtcatgtagcatctggtcatgtctatgttcccagccgagctgcaagaatagcatctgctaaatccagtgaacaatggcctactactgccaaatcaacccctgtgcctgaggca

SEQ ID NO: 90271 - DNA, 267 bp, Glycine max
  Clone ID: 700904863H1
gtgagtttggaacttgaaagaaactagaatggccactttagacgaacgcctttctgcgaaaaggtggcttcctctcgaagctaaccctgacgtcatgaaccagttcctttggggtcttggccttccagtctgtgaggcagagtgcggtgatgtgtttggcttagatgaagagcttctggaaatggttcccaagccagttctcgccgtgctttttctttatccaattaccgcgaagtctgaagaagaaaggttgcaacaggaaaacgt

SEQ ID NO: 90272 - DNA, 167 bp, Glycine max
  Clone ID: 700904865H1
ataaaataaacactttggtgaaactttatattttgcatgttgtattcttaaaagaataccttataaacaaaaaaaaaaatctttatgaattatggagaaaaagagaaccaaatctgaaatatcttaaagtgtgggggtgtgtagtaaatgttaatatccctattaat

SEQ ID NO: 90273 - DNA, 264 bp, Glycine max
  Clone ID: 700904866H1
aatttttctctcaaccggcccaatttagcataagcccagcatggccaccgcaacagcagcagccacctcgtccttcatggggacgcgcctcctggaggcccactccggggcggggcgggtgcaggcccggttcgggtttggcaagaagaaagccgccgccccgaagaaagtttccagggggtcgggctctagctccgataggcccctgtggtatccgggcgccaaggcgcccgagtacctggatgggagccttgtcggagacta

SEQ ID NO: 90274 - DNA, 263 bp, Glycine max
  unsure (1)..(263): unsure at all n locations
  Clone ID: 700904867H1
gaaaaagagaagagcttatggtggaaggttgaagaaagagatgagtggaactggaacattcttctacggttcggtaattcagccgttgattcgctaccactatctatcaccaccaatccctattcgtcccttatgctgcatatcccctctcatcacctccattcactccaacgaagccgtctctccgcaaaacggaacgcttcgcttccagacagagcacaaggganacagcgaagaaccgcttcccgttccgtcactctctg

SEQ ID NO: 90275 - DNA, 265 bp, Glycine max
  unsure (1)..(265): unsure at all n locations
  Clone ID: 700904868H1
aatttctggctgcacaaaaggcatgtcctgcccatacagcataacttatgnagatggaagtacgacctctgggtcctatattaaggatgatcttacatttgatcgagttgttggtgatctccgtactgtgcctgataataccagtgtgatttttgggtgtggttctaaacaatctgggacattgagttcaactactgatacatcccttgatggaataattggttttggacaagcaaattcttctgtgctttcacagcttgctgca

SEQ ID NO: 90276 - DNA, 265 bp, Glycine max
  Clone ID: 700904869H1
caaagagcgactacagctacttctggacctgcaactggttttccacgcaacccacaacagaaaactgcaatgtctggcctgctcaatgatccaagtatcaaggacttggctgaacagatagcaaaagatccatcattcaaccagatggctgagcagcttcagaaaacttttcaaggagctccacaggatgctatgccgagctttgataatcaacaatatttttcaaccatgcaacaggttacgcagaatcctaattttatgacca

SEQ ID NO: 90277 - DNA, 264 bp, Glycine max
  Clone ID: 700904870H1
gtctcaaacaactgccagacattccttcaatctcaaagcaagaatgtcattatttcatttttggcagctttatcaataatcattcatgtgtccctctcttggctattcacaatgcaattcaagtatgggattcctggggcaatgatttcaacaattttggcatactggattccgaatattggtcaactaatatttattacatgtggttggtgccctgaaacatggaaaggtttctctgttttagcattcaaagatctttggcct

SEQ ID NO: 90278 - DNA, 265 bp, Glycine max
  Clone ID: 700904873H1
tttctcacatctctcctctcctcttctcttctcagcacagctaaagcttttaactttcaacctcttctgaatccaaataacctttttctgtttccaaaacacatactatatatctctctctctctctctgtttttcggtttcctctgatcatgggtcgtccacccagtaatgggggcccagcctttcgcttcacccagctgggggtatcagaaatggaagctattcttcaagaacataacaatgctatgccgtcacgtgatgttc

SEQ ID NO: 90279 - DNA, 263 bp, Glycine max
  Clone ID: 700904874H1
cgtcgtcgtcgtcgcgaagaaaatcgagcacgaaggtgaaagcttcaaccgatgcgaacacgaacctgagcatgctcaacgaggaccttctccagaacattctagctaggcttcctgctctgcatttcgcttccgcagcttgcgtcagctaatcatggaactctctctgcaatcgcatcctcactcgccccaaactctcttccgcgatttctctcaacccttcgctccccgatgctgtcaacgaggttgttcacaaggttctt

SEQ ID NO: 90280 - DNA, 262 bp, Glycine max
  Clone ID: 700904875H1
ggaaaatgaagaacaatgccattgtttgcaacattggtcactttgacaatgagatcgacatgcttgggctggagaactaccccggcgtgaagcgcatcaccatcaagccccaaactgacagatgggtcttccctgagaccaacaccggtatcattgtcttggctgagggtcgattgatgaacttgggatgcgccactggacaccccagttttgtgatgtcctgctccttcaccaaccaggtcattgctcagcttgagttgtg

SEQ ID NO: 90281 - DNA, 261 bp, Glycine max
  Clone ID: 700904876H1
gggttttagcgcagttcttctagatttaaggaagatgggtaaggaaaaggttcacatcagtattgtggttattggccatgttgactctgggaagtccactaccactggccacgtgatctacaagcttggaggcattgacaagcgtgttattgagagatttgagaaggaagctgctgagatgaacaagaggtctttcaagtatgcctgggtgcttgataagcttaaggctgagcgtgaaagaggaatcacaattgatattgc

SEQ ID NO: 90282 - DNA, 260 bp, Glycine max
  Clone ID: 700904877H1
aacaacacaaggccatcatcatggcagctgcttctcctatggcaagccaactcaagtccaccttcactaaaactcttgtagctcccaagggcctctctgcctcttcaccactccacctcctgccttctaagaggcaatttagctccactgttagggccatccaatcagaaaagccaacctatcaagtgattcaaccaatcaacggtgatcccttcattggaagccttgaaaccccagttacatccagccccttgattgca

SEQ ID NO: 90283 - DNA, 261 bp, Glycine max
  Clone ID: 700904878H1
gaagagaagaagaaggttcaaaatccaatccatttttcatttcgaaagatcgtgatcgcaatgtccctctccaccgtgaggcagcggcgctcggagccgtctgatccgtcgccatcagaaccgtacacgaagctggacaagcccgagaaagcggaggagaaagacgaagggttggggtgggttttcccgttcgtggctcttgggttattgaggtacatgagtgccacctccaacatcatccacgatagcgacgaggtcttc

SEQ ID NO: 90284 - DNA, 263 bp, Glycine max
  Clone ID: 700904879H1
ctccaacagttcaaattcgaggacagccagtgaaccagaaggctggttgctgctcgacttagagagagacgaagtatttggggtcttagaagttcatgtgtctcagtggcatctaaaactagcttttcacattgctttcatatcaagattgttcgtcatgatttgttcctcttatcgttaagccgttgttaaaacttccattattttctatgtatttgattttaaaagaaaaaacatttgtacaaaattaggaatattggtga

SEQ ID NO: 90285 - DNA, 263 bp, Glycine max
  unsure (1)..(263): unsure at all n locations
  Clone ID: 700904882H1
ctcaaagccaatcggctcgagcttcttttctcttagcttctcttagtgtanaggttttctcgtgctccttggagaagagttatgcctttcaagcagcaagaaaggaggacacagaaagcaacaatcttcatcaatatactcatcttgttcacctcagctcactccttccttcatcttcttgcagctcttctaccaaaggtcgacaaacaaaagcatcattagaagtggtacacaaacatgggccatgctcccaactaaatgat

SEQ ID NO: 90286 - DNA, 263 bp, Glycine max
  Clone ID: 700904883H1
actccttccattccatcatcttctacccacaccaaaaatcctaaatgaaccccaagacaactcctcctcctcctcctcttcttcttcttttctctcttagagcccacaatcactttctccttagacgaaagattcgaagcctgcgtgcccaagacatgtgggaatgggcagaacataagctacccgttttacatccaaggcaagcaaaaacccttttgcgggcagccaggcttcgagctaacgtgcggtcacaacggcttccc

SEQ ID NO: 90287 - DNA, 248 bp, Glycine max
  Clone ID: 700904884H1
atttgagggttaatataatagaggcacaagacttgcagccaagtgataagggtagataccctgaagtttttgtgaaggctactctgggaaatcagaccttgaggactagaatctctcagagcaggaccatcaatccaatgtggaacgaggatttgatgtttgtggctgctgaaccatttgaaggagctcctgatctgaatgtggaagacagatgtgcaactaaccaagaggagtcgctgggggaggtg

SEQ ID NO: 90288 - DNA, 258 bp, Glycine max
  Clone ID: 700904885H1
gattgagtcatgggcaagcaagggccttgctatcactgtggagttacaagcacacactttggcgtaatgggccacctgagaagccagtactatgcaatgcatgtggatctcgatggaggacaaagggaacacttgcaaattatacccctttgcacgcccgggcagaaaatattgattatgaggatcaaaaggtttccagggtaaagagcatatcattaaataagaacacagaagtgaaattggtcaaacgaaagcaaa

SEQ ID NO: 90289 - DNA, 261 bp, Glycine max
  Clone ID: 700904886H1
cttgcagtgagttgcaatctggtacaagacagtatgtaagtaggtacttccgtactgctgttgaggttttgtctggtgatcaagtatcttgttcctaccttggaggctgcaccatcccagcggactgcatcaagttaagccattataggggttggaacagggattcttgatcaaccaacctgagtacagaattcttctggtgaatctgcagaaaataattactctgataaaaaggttaggcactttgaattcttttagctg

SEQ ID NO: 90290 - DNA, 262 bp, Glycine max
  Clone ID: 700904887H1
gagaggaagagggagtgagagagagtgttcttcgtttgctaccttctcccagaaatggttacgttcaggtttcaccagtaccaggtggtcgggagggctctcccaacggaagcagatcagcatccgaagatctaccgaatgaagctctgggccaccaacgaggttcgcgccaagtctaagttctggtattttttgaggaagctgaagaaggtgaagaagagcaatggtcaagttcttgctatcaacgagatttttgagaaga

SEQ ID NO: 90291 - DNA, 259 bp, Glycine max
  Clone ID: 700904889H1
ctcgcaagcaaaaagaaagaatcccaggcgaggagaaagatggaggggaaggagcaggatgtgtcgttgggagcgaacaagttccccgagagacagccgattgggacggcggcgcagagccaagacgacggcaaggactaccaggagccggcgccggcgccgctggttgacccgacggagtttacgtcatggtcgttttacagagcagggatagcagagtttgtggccacttttctgtttctctacatcaccgtcttaa

SEQ ID NO: 90292 - DNA, 256 bp, Glycine max
  Clone ID: 700904890H1
gctggatcatgatgaaagcatcaacatcaccctttaacctaaagtattaaaatgttggtttattattattactcatagctcaaaacccaattttaccctaccaattaaggtctctcatacagtagtattttatttgcactacgtactggctactttatttatttaagcagaagcaggtgagtgagtgagtgagcaagagtgaagagcgaagagaatggctcccaagggtttaatctttttggctgtgttatgcttc

SEQ ID NO: 90293 - DNA, 256 bp, Glycine max
  Clone ID: 700904891H1
gcacaatcatattggtacatacatgtcatgtatttataaaatccatgttacattaatttgttgatacatattgaattttacattttattatatcttcaactgcaaacattgcctcgccagggaataacaagacgattgaagaaagcaagtaaggaaattgaccaattcttggagcaaattatccaagaccacgaacataatcaatatgataattataaagtgcaaaaagctccacacaataacaaggactttgtgg

SEQ ID NO: 90294 - DNA, 258 bp, Glycine max
  Clone ID: 700904892H1
ctatcttcttcaccttgctctcaccttctgggtaatgtttgaaacttggtgttagctgagctgtttgacaaaaatgaatattgcacaagttacagcatggcagcctgggatttgtgtgaaaaatatgtctcagttgcaccggcttcaatctaaaccatgtgttataccaaagagttttggtcctctcacttgtgttctactgagcttaagagcaagacaatcgtttagctcgaaatgttggcccattttacaatctcg

SEQ ID NO: 90295 - DNA, 258 bp, Glycine max
  Clone ID: 700904893H1
cctccctggccgaaacggagccggatcaggccgcggaatccctaagccgtttgcgaaaatccgtttcccagcacggaaaccccactcagcgagtgggcttttacttctggcaggccctctcccgcagagaagaaaagggccataatagcacttgggatgaggagttaacactctcttacaaagccctgaacgacgcctgcccttactccaagttcgctcacttaaccgccaaccaagccatccttgaagccacccaaa

SEQ ID NO: 90296 - DNA, 258 bp, Glycine max
  Clone ID: 700904894H1
acacgctgccacaatatagttccgtgtatgttagtgcaaagtctggtccggtgacgcctcaatcttctgttcgttgggataatccaagcaaagagaaggttaatagtcatatcagaaaccggtccagccccttgcggaggttgttagaccctttattgaagcacaaggcatcagataaacacaattcagctcaaagcagtcaggcactagagggtggaagtgcaaattcaagcttcaggactattggtgtcaatgaat

SEQ ID NO: 90297 - DNA, 244 bp, Glycine max
  Clone ID: 700904895H1
atttagtctctaatttctaaaactcgtcagtgcaatagtataatggacaacttcgaagatgctacagagccagtgagtcctagtggacgattcttcaacaccacggtgctatatgcgtatgtttttggcttcttagaatcagaagttccaattgaattctctcaagccaagtatttgttcgaagatgtctttctacccgtcaatccacacttttcttccataatggtgagagatgaagaaggag

SEQ ID NO: 90298 - DNA, 251 bp, Glycine max
  Clone ID: 700904903H1
gcacaatatcttagaaagcgaatactgattccagataagaaactaggtactcttactagtgatattgctgggcagttgaaagatctaagacaaggccgtgtagagtttaatatggaaagtaaatcaattttgcatgtgggacttggaaaggtaagctacaaagaagaggctttacgggagaatattagtgcatttatgaatgctgtattgcttgtaaagcctgctggcttaaaaaagacttccaaatatgc

SEQ ID NO: 90299 - DNA, 77 bp, Glycine max
  Clone ID: 700904907H1
cgagaatagagaatggtcaaagtaaaaataaaatgaaggaattaaaaatggaaggcgtgcttctccacacaacatac

SEQ ID NO: 90300 - DNA, 253 bp, Glycine max
  Clone ID: 700904910H1
gtgagttacagacacaacacaacgcacttcttctcactgtccccatggcatcgagcacgatccgcaaggcgattggcgtggtcaaggaccaaaccagcatcagcattgccaaagtcgccggcaatttggcccccgacctcgaggtcttaatcgtcaaagccaccagccacgaacaagtccccgccgatgaaaaatacgtccgagaaatcctgacattgacgtcgctttccagaagctacatcaacgcttctct

SEQ ID NO: 90301 - DNA, 253 bp, Glycine max
  Clone ID: 700904911H1
tttcctttcattttccctcactttctcgctccccaaacgcccctctctctcctccaatggccgaccagctcaccgacgaccagatcgccgagttcaaggaggccttcagcctcttcgacaaggacggcgatggttgcattactaccaaggaacttgggactgttatgaggtcacttggtcaaaacccaactgaggcagaactgcaggatatgataaacgaggttgatgctgatggcaacggaaccatcgattt

SEQ ID NO: 90302 - DNA, 253 bp, Glycine max
  Clone ID: 700904913H1
ggaggagagtgtttctcctcgccaaaggagatatggctgattccagaaatcgcttgctgatacatacgcactccagtcttatttggcgaggaggagagtgtttctccaaaaaagcccactactttgcctgaggtggccaagcagcgtgagctaagtggaactttggaaagtgcagactctatattgaaaaagcaactctctgatgcgaagtgcaaggagcttagtggtcatgacatatttgctccaccaccag

SEQ ID NO: 90303 - DNA, 256 bp, Glycine max
  Clone ID: 700904916H1
ctcaatataagaccttctaacttattcttctcccatctattttataagcaaccttggggctttccaaggtagtagcattctcacacaatggcctcgtgttgctctcttctattgctctccttaatattccttctttcatcatctgtctctcatgcactttccaatgccgaagtctctttcattgctcgtcgccaattgttgcacttacacgagaatgatgaattatctgacaactacgtagataattatgaaacaa

SEQ ID NO: 90304 - DNA, 254 bp, Glycine max
  Clone ID: 700904918H1
cttcattcgggactcgccatagtgattccttcttcgctcctattcattcgttgcgtgctcgttcggttgttctcgtcgttccagtgaagagttccattttagtcctacacccttgtgtgagaatagatggcgccaatcctgcagagcactcagccatgggtcgagaaataccggccaaagcaagtgaaagatgttgcccaccaagatgaagttgttcgagtactgacaaacacccttgaaactggaagttgtcc

SEQ ID NO: 90305 - DNA, 251 bp, Glycine max
  Clone ID: 700904922H1
gtagtgaagaaaatgaaagtccttgttttctttgttgctatagttctagcagcatggcattgccatggctcagaccatgaccatgaccatggccacacctaccaaattttccctctgagaatgaaaactggccatggtggccactacattccggaggtatcatgccaaagttggaggcttggtgtggaagcacacaacgtcattgactggaaaaccgttcctcaagattgcgagggatatattgggaacta

SEQ ID NO: 90306 - DNA, 251 bp, Glycine max
  Clone ID: 700904923H1
ctcgagccgcgtcgacgacattggcgacgtcaccatcaccaacgacggcgccacgattctcaagatgctggaagtggagcatcctgctgccaaggttttggttgaactcgccgagcttcaggatcgagaagtcggagacggcactacttctgtcgtcattgtagctgctgagcttctcaaaagggcaaatgaccttgtcaggaacaagattcatcctacctcgattatcagtggatctagacttgctatgc

SEQ ID NO: 90307 - DNA, 253 bp, Glycine max
  Clone ID: 700904924H1
tttcagaggaaagaaatttaaacagagcacgaagatgaagggtctcttcaagtccaagcctcgcactcctgcagatgtagtgcgccagaccagagatcttctgctctttgttgatcgcagccccgaaacccgcgaaagcaaacgtgaagagaagatgtccgagctatttaaaaatatcagggagctaaagtcaatcctgtatggaaatagtgaatctgaaccagtgtctgaagcctgtgcgcagttgactcag

SEQ ID NO: 90308 - DNA, 252 bp, Glycine max
  Clone ID: 700904927H1
gatttgttggccgaccttcaaaatgcgctgttggagcaacgtcctaactacgcctctgcttccaaattgaacacaacaagggaaagccgttatcacactcagattcgacaccgcttaacccaactccaaggattgccttcaagcagaggagaggacctacagactatgtgcttgcttgagctttatggactaaagctagctgagttgcagaggaaggtgcagactgacgtgaattctgaatactggctcaat

SEQ ID NO: 90309 - DNA, 253 bp, Glycine max
  Clone ID: 700904928H1
cttaattcttaactacaagagagagagagagagagagagagagagcgagagagagagggagtgagtgagcatcatggattcagagacgagtagaggtgcttctttgacggtgaagtatttgcaaatggggatatggtggctctcagtgatgatctgtgttgggtatttaatggtttagagtgagatgcccaccaacatcttctttacacattggtttccagatattcaagctaaggcagattcaatatacttc

SEQ ID NO: 90310 - DNA, 257 bp, Glycine max
  Clone ID: 700904931H1
gatcagagctgtaattgtacgtacttgtaaagaactcaaacgtagcaacggtataataattcagtatgatgataatgctgcagttgtcattgatcaagaaggaaatccaaaaggaactcgaatcttttgtgcaatcgcccgggaattgagacagttaaatttcactaaaatagtttcattagcacccgaggtattataagacgaaactgtgctatggatacattatttttttgtgaaatagattaattaatctattt

SEQ ID NO: 90311 - DNA, 258 bp, Glycine max
  Clone ID: 700904932H1
atcggcatttccgaggagtgcgcgtgcgtttggtgtggtcaacggaagcgagataaatacacagagagagagagagagagagagagaggtgtgtttgttctctgagtagaagaagatcaagatcaaggaagaggatgtcgaaagaggatgtgtttgttggcgcgatcgaccaaggaacgagcagcagcaggttcataatatacgacgcgaagactggagtagtaggatgccaccacgtggagttcacccagttctacc

SEQ ID NO: 90312 - DNA, 253 bp, Glycine max
  Clone ID: 700904934H1
cttaaccgcaacaatccccaactcgctctctccattttctacgccatgcgcgccatatttcatcaagttggcgagagtggtcctttggctgagagatggaagtggtcgaggccaaatgcaaatgtttatacattgttgattcaaggtttagcggcggtgttaagggtttctgacgctctcagggttattagatatatttgtgaaatcggcgtttctcctggtgaggaggttccgtttgggaagatagtcaaat

SEQ ID NO: 90313 - DNA, 252 bp, Glycine max
  Clone ID: 700904935H1
tcgaaacattgcttgcaaaaacaattcacgatcacagactttgagcgaccttgttcatggcaagttttctgctagaaaagaaaaagactagttagttaggcttttatgcaaagaacagagttctcccaaacacttcaatcaaacatggctttaccagccaatgaaacctccatggcagaaaggtctcagtgggtgctcaatgctcctgctcccccatccacgtggcacaacctcatggcttctgtgaggaac

SEQ ID NO: 90314 - DNA, 251 bp, Glycine max
  Clone ID: 700904936H1
cttattataaaacccagcttgatgaagcggagaaaaggttgcaagattctgaatccaaattggcccgccttcgaggtcaaacagtgtcatctagaagtaccttagatgatggaatcgaaactttgaagacaaagagcagatcaagcagtcccattgatagaaacgaagtttctaccaaaagccaacatcaatctaaaccagaacttcttattccttcactgaatccaaaaatatcacaacctgtattgttg

SEQ ID NO: 90315 - DNA, 247 bp, Glycine max
  Clone ID: 700904939H1
gatgattcgacacgccatgttgtgcgtgctctgttacggaattgtagttatgaagtcactgctgtttccaatggtcttcaagcgtggaaagtcctggaagatccagaaaatggcattgatcttgtcctaacagaggtagctatgcctattttgtctggaataggtcttttgtgcaagatcatgagccacaaaactctgaagaatattcctgtgattatgatgtcatctcatgattctatgggtatag

SEQ ID NO: 90316 - DNA, 251 bp, Glycine max
  Clone ID: 700904942H1
ttcgggctttctggtcttatttgtcttgaagatgaacatgctgctcctcaatctagaagatatatacctccaaatcatacgacagagttcttgaacaggtttcaaagaaatgcaggcctggtggcatctggtgttgccaaaaacttgaacagagtgggtaactatgtgaaagatctcctaaatgacattctaaactaattctacaatgcaccttgcatgggtggtacattcatgctcccttatgttgattt

SEQ ID NO: 90317 - DNA, 250 bp, Glycine max
  Clone ID: 700904943H1
gattccagtatgaaagttgcagttcgtatttgatgaagatagtggagcctatcatgaaaagctatatgaacgaaatccatgtggatagttatgaactctctgtaactgaatccaaacttgcttggttcacacacatagttgctccaattctcagaacaaaacagatttctggttctagtggagaatcgcatgagatacttgatgcggagatttcagcatgtgttctgcagttgattaatatttgtgacag

SEQ ID NO: 90318 - DNA, 255 bp, Glycine max
  Clone ID: 700904947H1
cccaaagtgcttctctcctctgtctttttctctctcttgctatccttttggctagtggcactgctgcaagtgcaactccaagaagcgcagtgccaagccaccatgtttcaacattcaacagaagcctttttccttccacttttctctttggaattggttcttctgcttaccaggcagaaggagcagcaagtgtagatgggagaggaccaagcatatgggacacctacactagacagcatactgaaaagatttggg

SEQ ID NO: 90319 - DNA, 201 bp, Glycine max
  Clone ID: 700904949H1
ttccaatcgttaacagtgtcagccaaatctgttacaatggcaagggcattaaaacgcaagcctcaatgttactgtagccatagatggtagtggagatttcaaaagcatcaatgaggcattgaagcaagtgccggagaaaaaccgaaagccatttgtgatctacatcaaggaaggcgtttaccaagagtatgttgaagttac

SEQ ID NO: 90320 - DNA, 252 bp, Glycine max
  Clone ID: 700904950H1
gcgggagctactccgtcctgtgttttctgtgcgattgccgccaaatccacctctagcaatactcttctttactccgacgataaggttgttgcttttcaggacattaatccatccgctttcaggcattacttggttgttcctgtggcgcacattcctactgttaaatatcttcagaggaaaactgacgactattctttggtgagtcacatgttagaggtggggaagacgttattaaatagagatgcacctcag

SEQ ID NO: 90321 - DNA, 251 bp, Glycine max
  Clone ID: 700904951H1
ggaaatggaagatgatgtggtctgaggcacctcttggtattgtttccccattgatggtgagggtgttggcagcaaagattcccaattctttatgcttgatattcaagtcatatgacatactgaaaggtcaggtcaggggcatgctattattcccattttcagcgaggaactgatgatactggttatagtgctgtaaagaaatattatatctgaaattttgtttctgccgagagtaactaacctgtaaatgt

SEQ ID NO: 90322 - DNA, 251 bp, Glycine max
  Clone ID: 700904952H1
cacgaagatactcttaaagagggagtttgaaggagggatatcagatccctatttgtatttggggttgtctttctgaacaaccccatcatatatcattaagaggggtatcaagatcaatccttgattagcaagatcataaattttcattcatatacacaatttacatatcgtaacaagatcacatttgttttgttttgtgttgtttgtgttgttgttgtgttgttgatctcataataacaacatggagggtg

SEQ ID NO: 90323 - DNA, 249 bp, Glycine max
  Clone ID: 700904953H1
accggagcaaaaaaacttgttacgatggtttcttccgacaaggatccacgagaggaagtccttcaagcatggtacatggatgatagtgatgaagatcaaagactcccccaccacaaagaacccaaggagtttgtctcgttggaccaacttgctgaacttggagtccttagctggaaattagatgctgataaccatgaaaatgatccagagctgaaaaagattcgtgaagagcgtggctacacctacatg

SEQ ID NO: 90324 - DNA, 249 bp, Glycine max
  Clone ID: 700904955H1
gtttattcaagtttatagttcttacaagattggggaaaaagaaaaagaaaaagaaaaagcatacaacgatggctatgaatggatcacctcgacggtgggacgtgagattagttttgacattttctctacttttaatttcagcctctgtttctgctcttgaacatgtaaaccacaaaaagattgatcccaccaccgctgaaactagttttcttggcaaagtcatgaactttttgtggagctcatctgggt

SEQ ID NO: 90325 - DNA, 249 bp, Glycine max
  Clone ID: 700904956H1
gagaggtgttggtgccctaatcgtgagaagaaaggaaagggaaaagaggaaaatggtgtgcataaggaaggcgacggtgaaggaccttctggcgatgcaggcgtgcaacctgttctgcctccctgagaactaccagatgaagtactacctctatcacatcctctcctggccccagctcctctacgtcgccgaagactacaacggccgcatcgtcggctacgtcctcgccaagatggaggaagaaaccac

SEQ ID NO: 90326 - DNA, 249 bp, Glycine max
  Clone ID: 700904957H1
gactcgtacctcgaccaaaatctctgcaacgtggattctaattttctctgtcttttccttcattattggtatgctcgtcacaagcaggatgttggacccaccggaatcaaacgggttgcttactgcgcagcatcagcgggaccaacaacagctacaagtgatctcaggggattgtgcaaccaagaagatgcagcccaaggatgcagtgagcgaattgcagtccacccatgaagccattcaagctttaga

SEQ ID NO: 90327 - DNA, 250 bp, Glycine max
  Clone ID: 700904958H1
agaggatgtcccctgtggtaatacagtggctatggttggtcttgaccagttcatcacaaagaatgcaacattgacaaatgagaaggaagtcgatgcccaccctatccgagctatgaagttttctgtctcacctgttgttcgtgttgctgttcaatgtaaggttgcatcagatcttcccaagcttgttgaaggtcttaagcggttggctaagtcagatcctatggttgtttgtaccattgaggagtctggt

SEQ ID NO: 90328 - DNA, 254 bp, Glycine max
  Clone ID: 700904962H1
gtccttcgtcagttaactatgggctaatcacaattcaggaagcccaaaactattaaagtatgtatatctgctctctcttttttgtttgactgagcatagtattcaactcaaagatgatcactgtttctttctttctctatatctcaaaaaggaaaccgacaacacaaaggatttgcagaaagtgcagctacttagttccattttcatcctctctccattaactttcagtcaaaacaaaacaaaacctctttagg

SEQ ID NO: 90329 - DNA, 256 bp, Glycine max
  Clone ID: 700904963H1
caacaacatagtgaacaacaaccttggtaataataaccatggagagcaccgaagactcatccacgagttcacagcaacaaccgaacctgccacccgggtttcggttccaccccacagacgagatactcgtggttcattacctcaagaagaaagtagattctgttcctctccctgtttcaatcatcgctgatgttgatctctacaagtttgatccatgggaattaccagccaaagcatcgtttggggcggaagagtg

SEQ ID NO: 90330 - DNA, 255 bp, Glycine max
  Clone ID: 700904964H1
cttacccccagatgtgctcaaagagagacttcctggcatctctgaaactgctgctatttttgctggtgtggatgttacaaaggaacccattcctgttttgccaactgtacattataacatgggcggtattcccacaaaccattatggagaggtggttaccattaaaggtgacaatccagatgcagtggttcctggattgatggctgccggggaaacggcctgtgcatcagtccatggtgccaataggcttggtgc

SEQ ID NO: 90331 - DNA, 250 bp, Glycine max
  Clone ID: 700904966H1
gacccaaacaaagccgaaagaaagaaagaaagcacgattacttgcacttgttcttcctctgcagtaaaaccctagctagccatcatcgtaacgtaatcgatccctctgactctcactctagaaccttcgactcgatccgaatccctagatcggattgcaaggctggcgggtattctggtcaagtaaatgacggatctcccccgccgcggcttcttattatcgttgatagggttaccgcgctgtgacgatt

SEQ ID NO: 90332 - DNA, 249 bp, Glycine max
  Clone ID: 700904967H1
cgcggcttcaaccttgtagttattctctttcttcttttttagctatccctctcttgaaaaatctagatctcgttcttccttgatctacgttacgcttttagtgaccggatctgtatggatctgaaccagatctacacgccgatggtggttttggcctggtctttcatagatctgatgcatggaggctcagatctactgtacagagatactgtagataatcgatgagaagaacgcagatccagccgcttc

SEQ ID NO: 90333 - DNA, 119 bp, Glycine max
  Clone ID: 700904969H1
atcatacttagaaacagcaactatgtctctcatgcagcttactagctcccctgttggctcactggtccgtttcattgtaatatttgctttatgggacataaccatggctttggccaagt

SEQ ID NO: 90334 - DNA, 247 bp, Glycine max
  Clone ID: 700904970H1
cgataacggaaccaagatggcccttgatgattgcaaggacctcttgcaatccgctatcgagagcctccaactcagcattgacatggttcacaacaacaacttgcaggccgtgcataaccaacaggctgacttcaagaactggctcagcgctgttatctcgtaccaacaggcctgcatggagggttttgacgatggcaaagaaggtgagaagaagatcaaggagcagtttcataccgagaccttggac

SEQ ID NO: 90335 - DNA, 247 bp, Glycine max
  Clone ID: 700904971H1
caacaatggcaccagctgcagccaagactctgacttacctggcccagcagaagaccctagaatcgagcttcgttcgggacgaggaggagcgtcccaaggttgcctacaacgaattcagcgacgagatcccagtgatttctcttgccggaatcgacgaggtggatggacgcagaagagagatttgtgagaagatcgtggaggcttgcgagaattggggtatattccaggtcgttgatcacggtgtgga

SEQ ID NO: 90336 - DNA, 249 bp, Glycine max
  Clone ID: 700904974H1
agctcgtcttcacgatccagcgattccgctctccaacgggactgcgcagggtgaagaatcgagaggccagccgccggtgaagaatcgcgcgattcgtctggaaatcgcgattccagcacgattcatgcccgatacagagatttaaccacgattcaggaacaaaaacgagacaacctccgattcgtattggtagcatctggaatcgtatcgaatcgtgcgatacgtatcctgaatcggttttggtttttc

SEQ ID NO: 90337 - DNA, 246 bp, Glycine max
  Clone ID: 700904975H1
gtcaaaaagaatgaagatgatggcgtcgaaacagtgccaccaactcatacgaaacccgaactcgacgccactgtcaaaatggaggaggccgaagacgaaccagaatcagttcgagacgatcccatagacgaagatatccctgaagaagacacagttgtgcgcgaaattgatgtcttcttctctccttctgtcgatgcccagactcagctatacgtctttcagtatcccttgagaccttcttggcga

SEQ ID NO: 90338 - DNA, 252 bp, Glycine max
  Clone ID: 700904976H1
ttgtaccatcgactttgtctttggagaacagccactgcatcaccaaagacaaagtcgatggtacctgatactgatgcaatcacggtagaattgacgcatggtgtgtgcgtagagtgtgtcctggtagccatccattcgacatttgtaaaagatggacctgtcagcttgaaccctcaaggccactgcttgatgtttttcagcaccagctgagttctccaaaattgcactttcgtggtgcgaaaaccattggaa

SEQ ID NO: 90339 - DNA, 249 bp, Glycine max
  Clone ID: 700904977H1
cgggataatattgtagaagttcagaaatggttcattctacctttttgacctattttgttgtcttttctgctgtgtttgaagggttcccgttttaaaacattgtttttgtggcagggagtgtacataggagccaagtttgattggttgcaattgagttgtaattggttgttaagggtaccaaaacccattaattcttcttccatgtaaagtcagccgaaatgattgaggctgattagaagactagggtgt

SEQ ID NO: 90340 - DNA, 249 bp, Glycine max
  Clone ID: 700904978H1
aggacattgtgcactgtactgaatttgagcttgtacctgcagctgttaatgctgctttacagactattgccaatgtttctatttcctctgaattgcaagatgctttattgaaggctggtgttttatggtaccttttgcctctgctgcttcagtatgactcaactgcagaagaatctgatgcaacagaatctcatggtgtcggtgctagtgttcaaattgccaaaaacatgcatgccataaaagcatcac

SEQ ID NO: 90341 - DNA, 253 bp, Glycine max
  Clone ID: 700904979H1
ataaaaattaaggaagcagaggagaaaactgagggtgggattttgcttccatcaactgctcaaacgaagcctcaagggggtgaggtggttgctgttggagaaggaaagacaattgggaagaacaatgtagagattagtgtgaagactggtgcacaagttgtgtattcgaagtatgcaggtactgaggtggatttcgatggtacaaagcatcttattgtgaaggatgatgacattgttggtatccttgaaactg

SEQ ID NO: 90342 - DNA, 251 bp, Glycine max
  Clone ID: 700904981H1
agctattgaatttcacttcacttcacttgcatgccaaatgaaaacaacctcttcccagaatcttgtcggtatttaactccctcgatttcacaacaccaataacaatgagagtttcaacagagacagagccgtagactaaaaagataaaacgcattcgccgcggcggggactcgagcaagcaccctttgtaccgcggcgtgcggatgcggaactgggggaattgggtgtcggaaatccgcgagccgaggaag

SEQ ID NO: 90343 - DNA, 250 bp, Glycine max
  Clone ID: 700904983H1
caagcaacagatcaaactcctccatattccacgcccaaatctttttaataaattttctccaaataccattcacacaacaacatcgatttgtaataccatgaagtttttttcagcaatagagtttctaagttcatttcttgtgctgatgttcttctaccctttttgccactcactcgacaacaccataaccataaaccaccccattagagacggcgacgttttggtctccaacggtttaggaaactttgcg

SEQ ID NO: 90344 - DNA, 248 bp, Glycine max
  Clone ID: 700904984H1
gcttccccacaccatcctctctcaacaagagccccctgcttaaattgtgcactccttctttatcccattctttcctcagattcgcgccaccattggaaaaaaaaggtttccggtgttggggagcctagggttagggtttctgagagatatgggatgttccatgcattcgtgagccttatcgcacgcggttggaagctgtttgggcacggtgatgacgtcggtaatgtcgccgccgccaccggaagaga

SEQ ID NO: 90345 - DNA, 250 bp, Glycine max
  Clone ID: 700904985H1
attttctggtgaatgaattcaaaagaactgagagtattgaccttgcaaaggacaggcttgcactgcagaggcttcgtgaagctgctgagaaagctaagatcgagctgtcttcaacatctcaaactgagatcaacctgcctttcatcactgctgatgcatctggtgcaaagcatctgaacataacattgacaagatcgaagtttgaggctttggtgaatcacttgattgataggaccaaggcaccatgtat

SEQ ID NO: 90346 - DNA, 248 bp, Glycine max
  Clone ID: 700904990H1
ctcgagccgaagaagtgcagttcccaaatggcaataatctttctttcaagctccgcaattcttcttccaagtcttgctttctttctcacattatttaaccttgcaagttccgaatcattcatcggcgtgaactacggacaagtcgctgacaacctgccgccgccgtcggcgacggcgaagctgctccagtcgacggccatcggaaaggtgcgtttgtacggaaccgacccggccataataaaagctct

SEQ ID NO: 90347 - DNA, 250 bp, Glycine max
  Clone ID: 700904991H1
cttcatattcatcaaactcatcaaaatgaatctgtaccactcctccaccaccaccaccaccaccaccatcttcaccgtcatattcctcctccttgcaatattattcactctcacaccccacaaggccaacggtgccacgtgtcaccctgaggaagaagcgggcctgttgggcttcaaatccggtatccgatccgacccgtccggcctgctcagtaactggatatcgggtacggactgctgcacatggacc

SEQ ID NO: 90348 - DNA, 250 bp, Glycine max
  Clone ID: 700904992H1
ggatttgcctgagactaagcaaattgattctaagtttaatgttgatgaacttaaagacaaagtagagattgaaaagcctattgtgaaggaggaaagtagtactatagctgttggagatagtctatctgcaggaaaagatgatacccaccaagatattgacattagtcctgctgccctgactgagaaacggaaatttaatgttgggaacagtgagcctgccaaaaggcaacgcaggtggaacactgaaaca

SEQ ID NO: 90349 - DNA, 251 bp, Glycine max
  Clone ID: 700904993H1
ccaagagcgagatatctatttagatctctgaaaaacagagtttcatttcaattcagtcttattattagggtttgccgattgagagagaaagagaaatgggagaacgaaaaggaatcccaatggctttggggctcttggcgatgatcctcttcttcattgcttcctcttcctctcacctcgttcgcgcttccgatgacgccgacgacgcgatcttctacgagtcgttcgacgaggattttgatggacggtgg

SEQ ID NO: 90350 - DNA, 253 bp, Glycine max
  Clone ID: 700904994H1
gttttctctttgagaaaatcgtatcttacaccttttggtgaccactttgagtgagagaagagaaattaagagagatactcacattagattcaagagagatggccatcaaccatgaaacttgggctttcattttcggtcttctaggcaacgtgatctcctttatggtgttcctcgctccattaccaactttttaccaaatctacaagaaaaaatctacggatgggttttaatcactaccttatattgttgcact

SEQ ID NO: 90351 - DNA, 241 bp, Glycine max
  Clone ID: 700905002H1
acgatggcgtcttcaatcgaaaagctcctagaaagtggtcgtcccttccttcgcggtgatctggagtccatcgacaagaacttacctcggctggttggcgtcctgcagagtgtgggtgccggggagtgctggcacaaacacggcagcttccttcaccacctcgtcgacgtatttcgcattctcaagctctggaaagcccctcactctgtctgcctctgtggcctcttccactcagcctact

SEQ ID NO: 90352 - DNA, 77 bp, Glycine max
  Clone ID: 700905003H1
gcgcaaaaaccctaaaccctgtgaatgaagaagacgaagaagagtggcgaagaagatgggggcaagctcaagttcaa

SEQ ID NO: 90353 - DNA, 98 bp, Glycine max
  Clone ID: 700905004H1
ggaatcggctcgagcttctttcctttgcaactagttacctagggttttgagtttgtgacgcatgttgcttggatccctgaaaatcaaatcagactcag

SEQ ID NO: 90354 - DNA, 121 bp, Glycine max
  Clone ID: 700905005H1
tgtcaaccaaaacagcacatgggagttatagaagctatgtgctgagttgcgaaccatcatcaatccaatcttttgtgttactataagtatttaacagcatagacattagacacattcttcg

SEQ ID NO: 90355 - DNA, 142 bp, Glycine max
  Clone ID: 700905006H1
cggattcggctcgaggataaaccctaatagtcacaccgtctcttcaaatatgtgtataaagaaagtctctcaatctcacgaccccgaagaatgtcaagacgtaaagcatctcttgccagtggctactccaaccgatggctcc

SEQ ID NO: 90356 - DNA, 53 bp, Glycine max
  Clone ID: 700905008H1
aaaacaaaaccaaaccattcaaagataggaggcaggcaggtaccgcacaccgg

SEQ ID NO: 90357 - DNA, 258 bp, Glycine max
  Clone ID: 700905011H1
ctcagaaccttctgaggttaaagcaaaaaacaaagagagagagagagagaaaatgatgaagccatcgatgctcagatctctccactccgccgccacccgcggcgcctctcatctcttccgccgtgggtacgcctccgagccggtgccggagcgcaaggtagccgttctcggcgccgccggcgggatcgggcagcctctctcccttctcatgaagctcaatcccctcgtttcgagcctctccctttacgatatcgccgg

SEQ ID NO: 90358 - DNA, 261 bp, Glycine max
  Clone ID: 700905012H1
ataatcttcatattcatcaaactcatcaaaatgaatctgtaccactcctccaccaccaccaccaccaccaccatcttcaccgtcatattcctcctccttgcaatattattcactctcacaccccacaaggccaacggtgccacgtgtcaccctgaggaagaagcgggcctgttgggcttcaaatccggtatccgatccgacccgtccggcctgctcagtaactggatatcgggtacggactgctgcacatggaccggagta

SEQ ID NO: 90359 - DNA, 258 bp, Glycine max
  Clone ID: 700905013H1
tgtgccttccttttccaaagggagcagcaacaacttgtgtactcttcttgttgttttccacttctcagaaagagatgcctcaccacaactatttcccttgcttgttgaagcctagtatcattattgtctagttcttgctgtgcttttttgtgttctctctctctctctctctcttttatggatcttggggtagtgggtttggagggggtggtgggttcagaaagtggttgcgtgtttggttcctctcttgcttcagat

SEQ ID NO: 90360 - DNA, 248 bp, Glycine max
  Clone ID: 700905015H1
ctataatgcattaatgctctgttgtcttctcttttcagatttggaatcttggctctcctgatcctaattttactttggatgctcatcagcaaggagtgaattgtgtcgattactttacaggtggtgactaaccatatctaatcactggttctgatgatcacactgctaaggtatgggattatcagaccagaagttgtgtcaagaccctagaaggtcacacacgcaatgtatctgctgtatgctggcat

SEQ ID NO: 90361 - DNA, 262 bp, Glycine max
  Clone ID: 700905016H1
tgtgatttcagtgagtgatcggtgttcacttgatctcatcataatcgtcagcgtcaattgaagaagatgccgatcagaaacatcgccgtcggaaggcctgaagaggcgactcaccccgacacgttgaaggcggctttggctgagttcatctcaaccttcatcttcgtgttcgccggctcaggctccggcatcgcctacaacaagctcaccgacaacggcgctgccacccctgccggcctcatctccgcctccatcgcccatg

SEQ ID NO: 90362 - DNA, 78 bp, Glycine max
  Clone ID: 700905017H1
atgacccttctcagcaaaagccctagcacaagagtgccaagtggtttctctgtccaaatctttttgatttaatttctc

SEQ ID NO: 90363 - DNA, 264 bp, Glycine max
  Clone ID: 700905018H1
gcacaatatcttagaaagcgaagactgatgccagataagaaactaggtactcttactagtgatattgctgggcagttgaaagagctaagacaaggccgtgtagagtttaaaatggaaagtaaatcaattttgcatgtgggacttggaaaggtaagctacaaagaagaggctttacgggagaatattagtgcatttatgaatgctgtattgcttgcaaagcctgctggcttaaaaaagactccaaatatgctgggtatgtgttgt

SEQ ID NO: 90364 - DNA, 134 bp, Glycine max
  Clone ID: 700905019H1
gagggaatccccccagaccagcaacgtctcatcttcgccggaaagcaacttgaggacgggcgcaccctcgccgactacaacatccagaaggaatcaacccttcacctcgtcctccgtctccgtggtggcatgca

SEQ ID NO: 90365 - DNA, 72 bp, Glycine max
  Clone ID: 700905020H1
cggaaaatttaaaggacttattccaaagcctattcccatagttaagcctattccgaagtcaattcccagtgt

SEQ ID NO: 90366 - DNA, 253 bp, Glycine max
  Clone ID: 700905022H1
ctttccaaaagataaaatctttacccttcacaccccaaccccttttggtttctcttctcaattttgcatctgggaatcaggctgcttctcagttcacaccaccaccaccatggtttcactcggagctacctgtgctttgtgctgttctgtgttgattgtgtttgtcactttgagttcggctggggacatagtgcaccctgatagtattgctcccagaaggcctggctgtgacaacaactttgtcctggttaaa

SEQ ID NO: 90367 - DNA, 253 bp, Glycine max
  Clone ID: 700905023H1
agaacacagaatcgcgtttgcgactgaggaatgagtttcctgcagggtatcgttgattccttcaactccatcttcatacccgataacaacaattatcacgacaccaattctccttcttcttcttcttcctcaacgaatcgaatggaagcttctcctcctcctcctcctcttcctccttcggtttcgaacgaacgcgttgcctacaagctcaaaggctacttcgatttggcgacgcaggagatcgcgaaaggcg

SEQ ID NO: 90368 - DNA, 167 bp, Glycine max
  Clone ID: 700905024H1
ctccattcgtgctttcagctccggcaacctctcttccggcgccgccgtatctcggccgcgcaccaatcttcaatttgattacttgggtcaacgatttctgtcattctcaatcatggcaactagacttcagtttgaaaataattgtgaagttggagtcttctctaaac

SEQ ID NO: 90369 - DNA, 253 bp, Glycine max
  Clone ID: 700905026H1
aacagatggcacaaaattgacaaatcatatcccattcctgattattgtgaggcagaggcacttcaaggtaagtttgagattccaattctcaccattacaatgccaaaaaaggccacttcacaagctgctactaaacaacaagaagtgggaacatcccaagagaaaggtgcagtagtagctgaaccaaagcctcaagaaaaagtccaagagaccacttcagcaccacaacctacaacaactactaaagtggaag

SEQ ID NO: 90370 - DNA, 254 bp, Glycine max
  Clone ID: 700905027H1
cacaaatcttagccgccattgatttttcctcttccatttctcttactttctcagcctttttcgattacccatttggttatttcgccctaatggctcttgctccatccaaagtttccaccttttctggtttttctcccaaacccagtgttgggggtgctcagaaaaacccaacttgctctgtttctctgagctttttgaatgagaaacttggaagcagaaaccttagggtttgtgcctcaacggtgcctctcact

SEQ ID NO: 90371 - DNA, 165 bp, Glycine max
  Clone ID: 700905028H1
tgcttccctcatttctaagcctggtgtcagtgtacaggctctagctccgacgctgcttcacgggcgcggggctctcatcgcagacgcttagagtggacgacgaatccacgctccacttctgggcaccgacgaacccaacggcccagaagccttccctggttctga

SEQ ID NO: 90372 - DNA, 100 bp, Glycine max
  Clone ID: 700905029H1
gccaattcttcaccctcccctccttttcgcagacgaaggcgcattctattctaacgttcacaagataggaaggcaagactaaagattccaccacctgata

SEQ ID NO: 90373 - DNA, 257 bp, Glycine max
  Clone ID: 700905030H1
cactcagattgttgcaaatttacagaggcagcaggttcagtccaagctcatcgcctctgattacttggatactaatttggatcttatggatgtcttggtatctggatatgaaaacacagacatggctttacactacggtgcaatgttgagggagtgcataagacaccagattgttgcaaaatatgttctggactcacctcatatgaagaagttttttgactacattcagcttccaaattttgacatagctgcagatg

SEQ ID NO: 90374 - DNA, 257 bp, Glycine max
  Clone ID: 700905031H1
tgccagagcgaatctcgcagtgctcggagcaattcctcctctcgtcggaatgctcgatgattcagaagacgctcattctcaaatcgcatcgctctacgctttgctcaatctcggaatcggcaacgatgcaaataaagcggctatagtgaaaattggcgcggtacacaagatgctgaagctaattgaatcgagcggttcagattcgtcggtgtctgaagcgatcgttgcaaatttccttggcttaagcgctttggatt

SEQ ID NO: 90375 - DNA, 256 bp, Glycine max
  Clone ID: 700905032H1
ctaaactcatattccaaaacgcagagccaaaccatgtcgttccccttcaaccactctcacgccacccacacccaccaccgcagggacgacgacgacgacgaacgacccaccgtttaccctccgccgggaaactccttcagcaacccgccacctccgttctacggcgtccctcaaccaccaccccctcagccggagacccacgtgttccattccgctcacgtgacaccaggacacgtgtcccatgacttcaacaact

SEQ ID NO: 90376 - DNA, 263 bp, Glycine max
  Clone ID: 700905034H1
tgaagattccacaacagtgggagggagatccaaaaagagagagtggaaaagatggcgcggttgatcacagtggtgtggtgcgcggtggcggtgctattatgcgccgcggccggtgcgtcgtgggtggaggaggcggcgaacccgatacgaatggtgtctggcgtggaggcggaggtggttcgggtgatcggggagtgccggcgtgcgttgaagtttgctaggttcgtgagcaggtccgggaagagttaccaaagcgaggaaga

SEQ ID NO: 90377 - DNA, 123 bp, Glycine max
  Clone ID: 700905035H1
gtaacaatggggtctctaatggcctctgccacattgactcttgtattggcaatagtgtctctaagcttgccgtctcaaatttcagctcataactacttgtactcatcacctccaccacccaag

SEQ ID NO: 90378 - DNA, 82 bp, Glycine max
  Clone ID: 700905036H1
accaaagccagggtttttctctttcaattttcatgccactcagattcacgggattatgtttcttctgccacacaaacccttt

SEQ ID NO: 90379 - DNA, 261 bp, Glycine max
  Clone ID: 700905038H1
aaaattcttctccttttgtgcttccaactcttttctttgttatattattctctttcactttctgccaacccttggagtcaacatgactatcctcattgagcaatctgatcactttggggctgaagtagaggcaaacactgaaccaataaatgagagagaactggtgttggatggtggatttctgataacacagaccaactcatttgggcacatgtttagggcttataatgatgctgaaagtgagaagcatgaaggagtgga

SEQ ID NO: 90380 - DNA, 85 bp, Glycine max
  Clone ID: 700905039H1
cttcgtctcaaatctcttcgttccttcgattcgttccatttcttccaaaatggccaaagacccagttcgcgttctcgtcactgga

SEQ ID NO: 90381 - DNA, 254 bp, Glycine max
  Clone ID: 700905040H1
aaagaaagcaagaatttgaaggaagaggggatatgaatacaaggagctagttgtctatttgcaataacataacatcatcaagcaggatcatcgatccaaccttagtattcaacccagagagatttgtagtaataattactacaacaacttaaaacaatggcaggaggaggttatgtagattcgggaaatgcaaagcaatttgaagggaaggtcactgcattcgtattggttacatgccttgtggcagccatggg

SEQ ID NO: 90382 - DNA, 110 bp, Glycine max
  Clone ID: 700905043H1
cttgaatcagcatctctgtaggatgcattgcaaactgctatcctcctcattcatctgatggatcgttgctgatggctgacatacgctgtcttcctggtgtgagccatttc

SEQ ID NO: 90383 - DNA, 254 bp, Glycine max
  Clone ID: 700905044H1
tgaagaaagaggaagagatgctttctgctgttaaggatagacaatccaaggatggggataaggagttctctaaggatgttcttgatgaacgtgccaagaaagcagaagcttggcatcatgattctgcagttcgtgcacggtacactaagccatcatcaccaatcacatgtgccactttcgcccaagatgttctagaaggaagagcaaaggcttcacaagcacacgatcacaagcatcaaccactaatatttgga

SEQ ID NO: 90384 - DNA, 254 bp, Glycine max
  Clone ID: 700905045H1
tgcagatgaggaagaacgaagtgatcgtgcagatcttgatgtttccactgatatgtcactgaagaagaaagggaaagcaagtgctggtgaatcaaccaagcaaggaaagatggatgcttcttccaaaagcggtggagcagcagcatccaatggatcaaagggtgcatccacgaagtctagccagaaggccaaagatggcaacaaatccaaaggttccaaggctaatagcaaatctgaggataaagttagtagaa

SEQ ID NO: 90385 - DNA, 154 bp, Glycine max
  Clone ID: 700905046H1
gcttcgcttccccttaattcccaaccttacattattaacttcaccaactcatctccctctaccaaacaaaacgacgcagcaaaaccctgtctctaaaaccctctctctgtctcccttccttctcatcttcaccaccaccaatggcgtcgcgccg

SEQ ID NO: 90386 - DNA, 256 bp, Glycine max
  Clone ID: 700905047H1
agaaattctgcaagcaataaatctagtggttctgtggcttcctcaaagaaaaacaacgaatgcagcgagagattaagtgaggctcaaagcacttgtacatcaccaattttcgaagctgagagtacatacgtggaaaatatgcaggatgtgccccagtatgtacattgccaagttatgcaaactcttgtgcagagcacttgtacatcccctatttttgaagccaagagtacatatgtggaaaatatgcaggatgtgc

SEQ ID NO: 90387 - DNA, 251 bp, Glycine max
  Clone ID: 700905048H1
tgcagatgaggaagaacgaatgatcgtgcagatcttgatgtttccactgatatgtcactgaagaagaaagggaaagcaagtgctggtgaatcaaccaagcaaggaaagatggatgcttcttccaaaagcggtggagcagcagcatccaatggatcaaagggtgcatccacgaagtctagccagaaggccaaagatggcaacaaatccaaaggttccaaggctaatagcaaatctgaggataaagttagtag

SEQ ID NO: 90388 - DNA, 143 bp, Glycine max
  unsure (1)..(143): unsure at all n locations
  Clone ID: 700905051H1
aaaaaatctattgtggcacccttgagaagatgtggtggtaagncaacatcaacaggccgagaccattttatgttgaaacgtgatcgaccaccacatgttacaattctttgtcttgtaagggctgctgcagctagattacctgg

SEQ ID NO: 90389 - DNA, 207 bp, Glycine max
  Clone ID: 700905053H1
gcaccataatgataatgggtttagctttttctttcttttttgtatgttttggggggaccaagttaggctgagagtatagctatagggtgaaaggaataaccaattgttcagcaattctgtaaatgactaaatgcttgcttgtcattgtggagggttttcgtttttttaacctgtgtcatatatgcctcataacaaatatgcggttcg

SEQ ID NO: 90390 - DNA, 246 bp, Glycine max
  Clone ID: 700905056H1
gtcttttgatactccagttgtggaagttgattcagctgttcaagatgaaattctcaaccttggaggacatagggctgcttgcaatgaaaaaattgatatttccaagatgtcagaatctacccgtcttgaatcatatgtctgtgatagcagttctcttgctgcaactcctggaaatgttgtatgggcgaggacagatggtcaagtgtggtggcctgctgagatcctggaagaaacatctgcattatc

SEQ ID NO: 90391 - DNA, 251 bp, Glycine max
  Clone ID: 700905057H1
cacaaaccctaacaccaaaaccagaagcgaaatcgcaatcgcaatccagcgaatatgaaggtcgtcgctgcatacttgctcgcagtgttgggagggaatccttccccttctgccgatgacatcaaacacatcctcggcgcagttggagctgaggctgagaatgagttgattgagttgctcttgactgaagtcaagggaaaagacttcaatgagctaattgctagtggaagtgaaaagatgtctgcagtgtc

SEQ ID NO: 90392 - DNA, 248 bp, Glycine max
  Clone ID: 700905058H1
ggatatgtatcttatccttgtcaacctaaatggttatactaagggtgccagaaatgagatatttgctatgcaacctgcaccaattcaagtttcatatatgggattccctggaacaactggggctacttacatagactacttagtcactgatgagtttgtttcaccactagggtatgcaaatatatattcagagaagattgtacatctcccccattgctactttgtaaatgattataaacagaaaaatc

SEQ ID NO: 90393 - DNA, 198 bp, Glycine max
  Clone ID: 700905059H1
ctcaagaaggccgacctgcacaaattacaatcagaaatcttgacgtgtctcccttccatgcctgatttgcacatactcagggagggaatctcaagttggcatattaaagaatatctgtacaattgtttgccacatagtgtaaaagatgacttggcgaacataatagcaccactcatgattagaccaattacaaggtgg

SEQ ID NO: 90394 - DNA, 254 bp, Glycine max
  Clone ID: 700905060H1
gcttggccaagatcatctgtggggcatccatttgcatcgatggaaagagccatgccttcccatattcaactcagaatagttcttttgttggttcatcacagcatcttcaccaccatcatgtcggctccgccccatcaggtttgccttttgagaggcactttggtttccatcccgagtcatctgaaacttcattcatgaataatgttggctatggaggcattggtccagggcataatgatggaaatcacatggtt

SEQ ID NO: 90395 - DNA, 249 bp, Glycine max
  Clone ID: 700905061H1
aagagagcaaggcaggaagtcagtgtttataaaacgacagtaggagcctggtctggtcggtgtggcactcaaacattgtttgttgtaggaagaggaatcttgagaaatggcaggggacagcaagagcaagattctgttcatcggagggactggttacatcggaaaattcatcgtggaagccagcgccaaagctggccacccaactttccttttggtgagggagtccatctctccaaccccgcaaaatca

SEQ ID NO: 90396 - DNA, 253 bp, Glycine max
  Clone ID: 700905062H1
tggagaaagagggatgaaagaagattttgggaaggaaatataaaacatttattcattgtcaacaaattttgttccctgcaagagagagaagaagaagttgttgggttgagttgggtttggattggatttctaatctaatctatacctttctttttcctatgcttttaaggcacaaatccttctcccttctctcttctttcttcttcttctcctgacccttattattattccttgcccttaccctttaggcaag

SEQ ID NO: 90397 - DNA, 255 bp, Glycine max
  Clone ID: 700904403H1
cccaactcaatttttctctcaaccggcccaatttagcataagcccagcatggccaccgcaacagcagcagccacctcgtccttcatggggacgcgcctcctggaggcccactccggggcggggcgggtgcaggcccggttcgggtttggcaagaagaaagccgccgccccgaagaaagtttccagggggtcgggctctatctccgataggcccctgtggtatccgggcgccaaggcgccgagtacctggatggga

SEQ ID NO: 90398 - DNA, 253 bp, Glycine max
  Clone ID: 700904407H1
aattccatgcgcctcttgatagggtctcccattttcaattccttctcagtttccttttctctgaaaaaagatgttgagggttgcagctaggaggctctcttctctctcctcttcttctccgttgcggcccaatcacgccgcttccgcttttctctctcgaaacgacgtcgtcgtcgatgaccacagatctgttccttcctcccatccccttcttcccttccgaggttttgctactgaatccctgatccaccca

SEQ ID NO: 90399 - DNA, 256 bp, Glycine max
  Clone ID: 700904409H1
atctagagcaaagtgattgattccagttccaatggccttcggcaccagcgccttgatcggaaggaaggttcttgtctcacccccaacccccaaaacaaccaaatcatctactccgctacaattccttttcaagagaagcatctttaatgctcacaattcacaagctgctctagctgcccttatcttttcctccgcgagcctctctgtgaccccacaagcccttgccgctgataacgtcacccctccccctgtaatt

SEQ ID NO: 90400 - DNA, 255 bp, Glycine max
  Clone ID: 700904411H1
ctttctttcttttcgaaaatgctgatttttcattttttttgccttttttcttcttcttccgtctgtatttgatttgttcccattaattctgaaatgattcaccttatttatttggaattgcgtggttttgatgtccaaatcttttctcacaactgatgtttcggccttctgtcaaattgaagcagtaaagttaattgatcaataatctaattggagccgatcggacttgttgactttgagcaatggtttattgtt

SEQ ID NO: 90401 - DNA, 257 bp, Glycine max
  Clone ID: 700904412H1
tttatttacaacaacaatggcttctgtgcctcaaccaaaaatctcccttctaaccttattcttcttctcgtccttcaccatcattgcgcatgcaattgttcctcaaaacgaaaccttcaaatttgagaactcaggtgaacttggaccctacatcgttgagtacggtgcagattacagaatgataagcatcttcaactctccattccaagttggtttctacaacaccaccccaaatgccttcactctagctttgcgtg

SEQ ID NO: 90402 - DNA, 257 bp, Glycine max
  Clone ID: 700904413H1
cttataactaggtatttattttctcatatgctcttcttaaacttctctttggtagtgtgttcacatacatatctacttattgttattattattgtcaccacatacaataatgggttccattagtaacaccgagcttcataatcatcacaatgatgatgacgacgatgatcatcgtcatcgggtgaatttctcgatccagagaggatttgggacaaaattgaaggaggcattgaaggaaacattgtttccggatgatc

SEQ ID NO: 90403 - DNA, 260 bp, Glycine max
  Clone ID: 700904414H1
tcttaatccaaccagctattgcaccagcagcttttgctacctttcaaactgctgccaagaccggtggtcctgctgctgcagttggtagaaaactaatccatactgagctcctaagtagtgcttggactggtttcttagctggctgcttgcacaccttatcagggcctgaccacctagctgccttggctccattgtcaatcggtcgaacacgaatggagagtgctgctgttggagccctttggggttgtggccatgatgct

SEQ ID NO: 90404 - DNA, 264 bp, Glycine max
  unsure (1)..(264): unsure at all n locations
  Clone ID: 700904415H1
cttcctcttaattactctatcattctttctcctcctcagaacctcaanaaccgaaaccaagcattacaattcccaatttcatagaaaccccagaatcaataaaaacacataacaacaaaagcagtgaaaaatggcgagctcggtggagaaggagagtggcgcgagcgaggaaactttctctttggagctgcctgctccaccaggttggaagaagcagttcatcccaaagaaagctggtaccccaaagaaaaatgagattgtgtt

SEQ ID NO: 90405 - DNA, 260 bp, Glycine max
  Clone ID: 700904416H1
gaaagagccaggcaggaaatatggagctggaggcccagaaggagacctccgacacagagatgactgagaatccagattccaagtccaatggcagaaggaaccaaaggaagtagagccatgaatctcaaagctaaaggtaccaattcctggataagatacactattggaggggccatttttgcattcttttgagcttctgagtttggataactgccacgtttgacatcaaagacatgggaacaggaacgagttactttggg

SEQ ID NO: 90406 - DNA, 263 bp, Glycine max
  Clone ID: 700904417H1
cctacagcccctttggactgattttcataactgggtttgtgtttgtgtttgtttttttttaactgaattatctatgtacttgtgttgatccttttgttgtgattcaaaacagcgatgttgttgttcttttagttttgttgatcatgatcatgatgatgggattctagagtcttcaattattggaagtgaggttgcttcaagtgtttttttttattgtattttttttcttctttttttttatcctaaagtctgaaacttgtggg

SEQ ID NO: 90407 - DNA, 257 bp, Glycine max
  Clone ID: 700904418H1
tttttattttatgcttttttctccgatgtgactggcgtttgtttggtgtgtttttcgtgtgcgtcgaaccctctgcgttcgttaattttgttttgtgttttcggatcgacttgtttcgcgttcggttgcggggatcttcggtttaggtaaatgagtggtaaatgagtggtttttgagcagaagcagttaaaagagaaagggattcagcgaagatgacatcggttggtgtggcaccaacttcgggtttgagagaagcc

SEQ ID NO: 90408 - DNA, 260 bp, Glycine max
  Clone ID: 700904419H1
atattttacaaattatttaattatcatggatgtcttgtgatgattttgtggttgaactttgtttattgttttcagtcaggaaaagtctatctccaaaagtgcaacaccacaataggctttccaccaatctctgaacacaacaagctgaatgcaaagccagcagggccaaaactccaagacctaaacttcccatcatcatccccctccaatgtgctattgaacctctttgatgaaacaagtttggaccttaaattggtctc

SEQ ID NO: 90409 - DNA, 257 bp, Glycine max
  Clone ID: 700904420H1
gtaactcgttcttcttcttttgttgttctgtgtccgtgtttgttttttctctcacctgaaaatgtcttgctgcggtggtaactgtggttgcggaagctcctgcaagtgcggcaacggctgcggaggctgcaagatgtacccagacttgagctacactgagtcaaccaccaccgagaccttggtcatgggagtggcacctgttaaggctcaatttgagggtgctgaaatgggtgtgcccgctgagaacgatggctgca

SEQ ID NO: 90410 - DNA, 256 bp, Glycine max
  Clone ID: 700904422H1
aaccaacccttttgagcttgcacaactctgatggtagttgcacaactacttcagactctctctctctgagtgcctcaccacacagattctgtgatataccaatggaggccctcaatgctgctggcttgacccctctatctgtgctctctgatagaacaaaaacaagaactaaacacccttctgtttctgcatgcaaagtctcaaacttttccacctccaccaacaagaaacaagcattgctgcaaagttgcatatc

SEQ ID NO: 90411 - DNA, 255 bp, Glycine max
  Clone ID: 700904423H1
tatggcacagaaaaaagcttctcatgtgcttgtatgcaaagagttaaagccacacctgctaatggtcttagtccaggtgggctatacctttttgtatttcatcactgaagcctccttcaatcatggtatgagcccttatgtgtatgtaacctatcgccatattgtggctgcggttgtgatgttcccttttgcatactttttggagagaaatgcaagaccgaagctgacatttgctcttttcatggaaatttttgt

SEQ ID NO: 90412 - DNA, 254 bp, Glycine max
  Clone ID: 700904425H1
gtctggaataatgatgtcaggttcttctgtgttaaggattcttctggtagtccaattgcgtatttttattttgatccttatagtcgtcctgctgaaaaaaggcaaggtgcatggatgaatgaagtctttgctcgtagtcgtgtattatcgcgtgatggcacctcagcaagattgcctgttgctcacatggtgtgcaatcaaactcctccagtaggaaacaagccaagtctaatgacattccgtgaggttgagac

SEQ ID NO: 90413 - DNA, 254 bp, Glycine max
  Clone ID: 700904427H1
agacaacattgacttgtgctggctctggtggagttgaagacatgctagtggggtgcctatggttgaatgattatcttgtcactgtttctcttggtgggacaatatctatatttttagcaactgatcttgataaagccccgacaacattttctggacatatgaaaaatgtttcctccttaactattcttagaagtaaccctagggtgctattgtctagcagttatgatggcttaatagttaagtggattcaaggg

SEQ ID NO: 90414 - DNA, 258 bp, Glycine max
  Clone ID: 700904428H1
agttggatgattgggttctttgccggatttacaagaagtccaaacatgctctaacttcaacagaggcatcaataggggtgggtgaggtagatcaagcagaggagcacttattccaagagacccttttgccaatctcaaaatctccagcacctccacctcaaaacacattgatatctcagaaatctgtgtccttctccaacttgttggatgccatggactactctatcctaagtagtttcttatctgagaatcatacca

SEQ ID NO: 90415 - DNA, 116 bp, Glycine max
  Clone ID: 700904429H1
atgcatgtgagtgaagaaggactgacatcgagagagagtgaaacgctgcctattctgaaagtcgtctccacgttctcctttgcgcatattgtggggtgtgctgtgctgtgtgtgcc

SEQ ID NO: 90416 - DNA, 261 bp, Glycine max
  Clone ID: 700904430H1
gggaagaggaaccctagctagggtttggaagaagctgatccgagaagatggtgcagcgtctcacctaccgcaaacgccacagctatgctaccaaatccaaccagcacagagtcgtcaagactcccggtggcaagcttgtttatcagaccacgaagaagagggccagcggacccaagtgccctgtcactggaaagaggattcaagggattccacatttaaggccagcagagtataatagatcaaggttacacagaaaccgaa

SEQ ID NO: 90417 - DNA, 262 bp, Glycine max
  Clone ID: 700904431H1
gaacaataacttttctggcgttgtgcctgaagggttatggggtttgccccatttgtatttgttggagcttgtttataattctctttctgggtcgatttccaattcgatttccggggcttggaacttgtcaatgttgttaatttccgggaataagttttctgggtcgattcctgagggggttggggaattgggtaatcttgaaaagtttgtagctaataataatagtcttactggtcggattccgaaaagtgtgtttaggttg

SEQ ID NO: 90418 - DNA, 266 bp, Glycine max
  unsure (1)..(266): unsure at all n locations
  Clone ID: 700904432H1
cacgtgtcaaagtctacgacaccgacccggcagtgttacgggcactatccggatccggaatcaaagtgacggttgatcttccgaaccagcaacttttcgcagccgccaaagctccctcctttgcatcctcatgggtcgaaaggaacgtcgccgcgtactaccctcacacgcaaatcgaatccattgcggtcggcaacgaggttttcgtggatccacacaacataaatgcaganctcgtacccgccatgaagaacatccaaaaagcc

SEQ ID NO: 90419 - DNA, 265 bp, Glycine max
  Clone ID: 700904433H1
ctcaaagcccgagctcaaggactaccagatcaacctaaaggagtgcgggcccatggtcctggacgcgctacatcaagatcaagaacgagatcgacccgagcctcacgttccgccgctcgtgccgcgaggggatctgcggctcctgcgccatgaacatcgacggttgcaacggcctcgcgtgcctcaccaagatcccctccgaaggcgccgccaccacgatcacccctctgccacacatgttcgtgatcaaggacctcgtcgtcga

SEQ ID NO: 90420 - DNA, 259 bp, Glycine max
  Clone ID: 700904434H1
acgaaaattagggtttgtagtgtagcaggaagaagcagcaatggcgccgaagataacacgtaaggttagcagaaaccctgaattgataaggggaatcggaaagtactcgaggtcgcagatgtaccacaagaggggcatttgggctatcaaggccaaaaacggtggcgttttacctcgccacgaccctaaacccaagcctgaagctcctgctgaaaaaccacccaaattttaccctgctgatgatatcaagaagcccctt

SEQ ID NO: 90421 - DNA, 257 bp, Glycine max
  Clone ID: 700904435H1
attgaccacaaggcgttgcatgatactttttctacatttgggaatatcctttcgtgcaaggtagctacagattcatctgggcaatcaaagggctatggctttgttcaatttgataatgaggaatctgcccaaaaggccattgagaagctgaatggaatgctgctgaatgataaacaagtgtatgtgggacccttccttcgcaagcaagagagagaaagtactgctgacaaggcaaagttcaacaatgtttttgtgaa

SEQ ID NO: 90422 - DNA, 250 bp, Glycine max
  Clone ID: 700904438H1
gcgtcttcataaacgcctttcttctccgtttccgtttcctcgttcgaattcgctttttgatctgcgaaaatgagagagtgcatctcgatccacattggtcaggctgctatccaggtcggaaatgcttgctgggagctctactgcctcgagcacggcatcgggcccgatgggcaaatgccaagtgacaagacagttggcggtggtgatgatgctttcaatactttcttcagcgagactggtgctggaaagc

SEQ ID NO: 90423 - DNA, 255 bp, Glycine max
  Clone ID: 700904439H1
cgcggatccatccgcgctgggttaggcttcactccgccgccgagacgcggtttccggcgacggtggagaggcaggattccgatcacgatcatgatcacgagcaccaccaccaacaccacggcgagcgccaccaccaccaccaccgccacaaggcgagctggttcgcgaagaagattcggaagttcatgaagctgttctgattttgatgttgcaacgacgaacgacgatgatgcatatatatatatagtagttata

SEQ ID NO: 90424 - DNA, 249 bp, Glycine max
  Clone ID: 700904440H1
ggaaaatgtccatggactcagatgggctatggcaatttggtttttaattggtgcattgattgttatttatttggaataccatgaaaggcagcgaatagggcggcagatatctggaagaggcaattgggtgcttggtaatcttgaggaagatgattcagttgatctcttgaggccaaccagaacaagtgcagataaagagttacagccctctgcgagaatggaagtccagttagaacctttgaacagatg

SEQ ID NO: 90425 - DNA, 252 bp, Glycine max
  Clone ID: 700904441H1
aaacagccaccatagttcttcgtggtggagctgatcagttcatagaggaagcagagcgaagtttgcatgatgcaatcatgattgttaggagggctttgaagaattcaacagtggttgctgggggaggtgcaatagatatggagataagccggtatctgaggcagcatgcacgtacaatagctggaaagtctcagcttttcattaactcctatgcaaaagctcttgaggttatacctagacaattatgtgaca

SEQ ID NO: 90426 - DNA, 250 bp, Glycine max
  Clone ID: 700904442H1
atgggccgcgcccttggaactcctccatctgcgcctgtctcggccaaaacgatcacttctgcagcagcgatctcgaagtttgtcttcttgggagtgtggctccttgtgtgctgtatggaagcaatgttgagagacttggatctgctcgtgggacatttgccaatcactgcttgccttattctggaatgtatataattggaaattcctgctttggttggaattgccttgcaccctggttttcctatcctag

SEQ ID NO: 90427 - DNA, 252 bp, Glycine max
  Clone ID: 700904443H1
ggttatgtgctttaccagcattttgggtagggttattgtacgatgaagtttctctacaaagtgttttggatatgacagctgattggactccagaagaaagacaaatgctaaggaataaggttcctgtaactggtttgaagacaccattccgagacggtgcgctgaagcatgttgctgaagatgttctaaagttggcaaaggatggcttggaaagaagaggcttcaaggaatcaggatttttgaatgaggttg

SEQ ID NO: 90428 - DNA, 255 bp, Glycine max
  Clone ID: 700904444H1
ccaattccaaagcccttgtttcactttttccaatccgatatggccgccgcgaccgccttgctccgctctctcccacgccgcgaccttccctcgtcttctctctccgcctttcgttcgttgacgagtggcacaaagacatcatatgtagggaacaagtgggcaagtttgtctcggccgttcagttcaaagcctgctggtaatgatgtcattggaattgatctgggtactaccaattcatgtgtttctgttatggag

SEQ ID NO: 90429 - DNA, 256 bp, Glycine max
  Clone ID: 700904445H1
ggcaccgttgggttagctcttggtcctcctcaatcatcgacatcagggttccatgctggcagctcttctgctataaatccttttgatgattggtcccacaacagggacaagggggctgatgaattcttttcggaagaagaaatccgcttcagaagtcacgagatgctagagaatgaagatatgcagcagttgcttcgcctcttcagcatgggaggtcatggctccatgagtgctgaggatggcttttcattcccat

SEQ ID NO: 90430 - DNA, 260 bp, Glycine max
  Clone ID: 700904446H1
ttatactctgcgaaataatttttgcgtttcattgtcttataattagcatggcctttgccgcagttaaagtgttcatgatattggggcttttagccaccgcgtgtgtagcacaagcccctggacctgcacccacgcaaccaccatcaacaaccccatcaccgtccacgtcagcacccgccccatcaccaaccgcaaacacccctcctcctgcggctgcacctgcacccgcaacacccacacccacacccgctccttcatct

SEQ ID NO: 90431 - DNA, 259 bp, Glycine max
  Clone ID: 700904447H1
ggattttcaagtctggccggggcacttcttgagaataacagtatacgtcatatacatctcaatggcaattatggtggggctttgggggctaatgcattagctaaagcacttgagagcaacaagtcaataagggaacttcatttgcatgggaattctattggagatgaaggaatctgttctttgatgacagggttatcttcacataaagggaaacttacacttctagacataggcaacaactcattaacagctaaaggtt

SEQ ID NO: 90432 - DNA, 260 bp, Glycine max
  Clone ID: 700904448H1
ctacaatatggaagtttctctatcttacattactggattgattggggtatcattggaagcagaagaggtcactaagttcttaaatcggatgcagttgcatgccaaactgtctacatctgataataagcagtgtaactttgtggtatctgtacctccttctagaagtgatgttcttcacccatgtgatgttatggaggatgtggcaattgcttatggattcaatgctattaaggatcaagcagtagtagataataaaggct

SEQ ID NO: 90433 - DNA, 261 bp, Glycine max
  Clone ID: 700904449H1
aacaacttgctccattccgaaacagttgttcatctttttcacttcccaaaatcctcaccttttctcgcagttttgctcgaaaaaaccctttgtttgttctttcatgggctcattctgggagcgccatgagcaaacgcaacactttctttcacaatctcatcaagcccttcaaattcagccccagcaaagagggacaaagcgaagtagaagaaataaagaacctagctgcacaagagcaaaagatcttcccctacgaaacat

SEQ ID NO: 90434 - DNA, 257 bp, Glycine max
  Clone ID: 700904450H1
tcttcttctcttgcggctagggttttagcgcagttcttctagatttaaggaagatgggtaaggaaaaggttcacatcagtattgtggtcattggccatgtcgactctgggaaatccactaccactggtcacctgatttacaagcttggaggcattgacaagcgtgttattgacaggtttgagaaggaagctgctgagatgaacaagaggtctttcaagtatgcctgggtgctggacaaacttaaggctgagcgtgaa

SEQ ID NO: 90435 - DNA, 258 bp, Glycine max
  Clone ID: 700904451H1
atttcagtgagtgatcggtgttcacttgatctcatcataatcgtcagcgtcaattgaagaagatgccgatcagaaacatcgccgtcggaaggcctgaagaggcgactcaccccgacacgttgaaggcggctttggctgagttcatctcaaccttcatcttcgtgttcgccggctcaggctccggcatcgcctacaacaagctcaccgacaacggcgctgccacccctgccggcctcatctccgcctccatcgcccatg

SEQ ID NO: 90436 - DNA, 256 bp, Glycine max
  Clone ID: 700904452H1
gatggatgttcattttccaacttgataccgcgttcgctcactctcaactcaacttcaattattcaaatcccacactttctctctctttccttcaaatctcaattctattttgcaaaatctgaatcaaacacagttaaagacgcacaagaaaacatctcgctcaacaccaccaacacttcggatctacgtttccactctccgaacatctctaaaggaaagaaaaaccgatttacagcgacaacaacgaacgaacgat

SEQ ID NO: 90437 - DNA, 253 bp, Glycine max
  Clone ID: 700904454H1
agaagagtgaaaacatcgcgaatggggactctctgcttccctctatttgcgaccatggcaatttgggggctattgttaggagcagaatcaaaaacacatgtcggagatgcagaggttctgaaggagctgaagcaaggtttggagcctggttcggtgaagccaggctcgtgcgtgagctcctgggacttcaccttggacccatgcgacaaccttttcggcgacaagttcacgtgtggcttcagatgcgacgtcg

SEQ ID NO: 90438 - DNA, 253 bp, Glycine max
  Clone ID: 700904455H1
ctcgttttttctcagaaccttctgaggttaaagcaaaaaacaaagagagagagagagagaaaatgatgaagccatcgatgctcagatctctccactccgccgccacccgcggcgcctctcatctcttccgccgtgggtacgcctccgagccggtgccggagcgcaaggtagccgttctcggcgccgccggcgggatcgggcagcctctctcccttctcatgaagctcaatcccctcgtttcgagcctctccct

SEQ ID NO: 90439 - DNA, 252 bp, Glycine max
  Clone ID: 700904456H1
ggcttatttaaacagcgaataaccaaagatgggcaggaggaagttgctgatgattggcttgagatgggcaatccctgggagattatttgaaatgatgtttcatatcctgtaaagttctatggcaaggttgtttcagggtcagatggtaaaaaacattggattggaggagaagatataaaagctgttgcacatgatgttcccataccaggatataacactaagactacaatcaacttgagactttggtctaca

SEQ ID NO: 90440 - DNA, 252 bp, Glycine max
  Clone ID: 700904457H1
aaacagactcaagttttactacaatggtgaatacgctggtttcgatgaagatgagccaacatcaaggcagggaggcaagggagatgttattaaaatgttgaagaagactcacagatacaactcaataattctgattggagacggtgcaaccgatcctgaagcctgcccaccagctgatgccttcattggttttggtggaaatgttgtgagagaggaggtgagatcacgtgccaagtggtttgtctccgattt

SEQ ID NO: 90441 - DNA, 252 bp, Glycine max
  Clone ID: 700904459H1
catactcaaactcactctttctaagttttttctatctctttctctctctctctgtctgccatggttctctccaaaaccacctccgaatccgacgtctctgtccactcaaccttcgcttctcgatatgtcagaacttcgcttcccaggtttaagatgccggaggagtcgataccaaaggaggcagcgtatcaaataatacacgatgagttgcatgttggatgggaacccaaggttgaacttggcatcatttgt

SEQ ID NO: 90442 - DNA, 256 bp, Glycine max
  Clone ID: 700904460H1
cgataaaggaactgtcctcatacatacagctgtgcagctagaaaattattcaaaaaccgaagaggctaaagtagaggagctcatcaaggcagtagcagattctggtgccaaagtgattgtcagtggaggagcagtaggagagatggcgttgcatttctgtgagcgttacaagcttatggttctgaaaatcagctcaaagtttgaactacgtcgattttgccggacaactggttctgttgccatgctaaaacttggc

SEQ ID NO: 90443 - DNA, 258 bp, Glycine max
  Clone ID: 700904461H1
tggatcatttggaatcgttttccaggcaaaatgcttggtaactggggaggcagtggcaattaaaaaggttttacaagacagaagatacaagaatcgtgaactgcagttaatgcgtgtgatggatcatccaaatgtgatctctttgcagcattgtttcttttcaactacaagtacagatgaactttttctcaatttggtgatggagtatgttccagagtccatgtatagagtcttaaagcactatagcaatgctaatca

SEQ ID NO: 90444 - DNA, 260 bp, Glycine max
  Clone ID: 700904462H1
gaagcaataagatgaaaatgaaagtgcttgttttgtttgttgctacagttttggtagcatatgaatgccatggctcagactaccagaagttccctctccaaatgaaaactgggtttggtgggcaatacagcaatgaggtggcatgtgccagttggaggcttggcgtggaagcaaacaacgtagtcaagtggcaaactgttcctgcagcttgcggagagtacatagctgactacgttctaggagaccaatatagatcagat

SEQ ID NO: 90445 - DNA, 255 bp, Glycine max
  Clone ID: 700904463H1
atttacaacaacaatggcttctgtgcctcaaccaaaaatctcccttctaaccttattcttcttctcgtccttcaccatcattgcgcatgcaattgttcctcaaaacgaaaccttcaaatttgagaactcaggtggaattgggaccctaattggtgagtaagggggagaattcaggatgattaggatcttcaaatctccattccaagttgggttctacaacaccaccccagatgccttcactctcagcttgcgtgt

SEQ ID NO: 90446 - DNA, 263 bp, Glycine max
  Clone ID: 700904464H1
agcaaggacagaaagaagttctaaggaagagggaatatgcagaatacaaggtgctagttgtctatttgcaataacaacatcagcgatccaaccttagtattcttcaacccagagagatttgcaataataaattacaacaacttaaacgatggcaggaggagcttatgtagattcgggaaatgcaaagcaatttgatgggaaggtcacggcattcgtattggttacatgctttgtggcagccatgggaggcttactcttcggtt

SEQ ID NO: 90447 - DNA, 258 bp, Glycine max
  Clone ID: 700904465H1
gcgaaaacaacgtcaacctcctcgaccgcgtctctgcctggtgggcccgcgtcggctccaacatgctcgaccgctccgacgccgtctccaaggtcgcattcgaatccgtggggcgcctcttccaggaattcagctccacacgcatgagcaagcttgccggcgataagctcgtcgattccgaaaactccctcgcgatccgctccaactgggtctcctccatggtggacttcgtgtggcggaacgccgcgccctcatggc

SEQ ID NO: 90448 - DNA, 253 bp, Glycine max
  Clone ID: 700904466H1
caaagagttgatgagcacatagaaaacaaagctgtgctgaatgaattgaatttgagtgctgtccccagtctatatgaactatttgttaaactgattgaacgtttgttggagaacaaagaggaggacaaggattcaattgtgattttcttgcttgacatgctagagattgtgaccagagacataatggatggagacattgaggggtaaatcatttgcaatttttgtatcccttgctaatttgataaattttgga

SEQ ID NO: 90449 - DNA, 253 bp, Glycine max
  Clone ID: 700904469H1
ggcaagaccatcacccttgaggtggaaagctctgacaccatcgacaacgtcaaggccaagatccaggacaaggaaggaatccccccggaccagcaacgtctcattttcgccggaaagcaacttgaggacggccgtacccttgctgactacaacattcagaaggagagtactcttcacctcgtcctccgtctccgtggtggcatgcagatcttcgttaagacactcaccggcaagaccataaccctagaggttg

SEQ ID NO: 90450 - DNA, 253 bp, Glycine max
  Clone ID: 700904470H1
ctttcttcctttgtaatagatagcacgcgtttctctctctcgctctctcaacgaatatatgtgtacttcctctctttgtgggtacattcaatttaccatgtcgagttcatcggaatactctcaattttccggccagaaaccggcgaggtcgccggagaaatcgagcttctctcagacttgtagcctgttgagtcagtacattcaggagaagggttagcttcggagatcttaccctcggaatgacatcatgtgg

SEQ ID NO: 90451 - DNA, 251 bp, Glycine max
  Clone ID: 700904471H1
tcgaaatcgctgttgttgggaggcgaaggcaaccatgaccatgaacggccaccataccgttaacatcgctaacagtaacaggcaccccaacgacgatgaccaccacgccctccctccctcctccgaccatgatgatgacgaacaagaactcgtggatcccgatgatccttttgacattactcaaaccaagaacgtatcgcacgacacgcttcgccgttggagacaagcagcactcgtgctcaatgcgtcca

SEQ ID NO: 90452 - DNA, 249 bp, Glycine max
  Clone ID: 700904472H1
gagaggacccggttattccattctcaagaaaatattattcggatagatatgaagttggcaaacgaagatgttagtatgcttgcatttacttcagagcagattactgctccattcctacttcccgagatggttgaaagagtggctagcatgctcaattactttctgctgcaattggtgggtcctcaaagaaaatcgcttagtctgaaggatcctgagaaatatgaatttcgtcctaagcatttgctaaaa

SEQ ID NO: 90453 - DNA, 248 bp, Glycine max
  Clone ID: 700904473H1
gaagttgtgccctaattttgacaatgaagatgggttggataccgtccttgaggtgccaattcccgaggagatgttgtccggcatgggcagcaatgggtccaatcgttggaagaacatgcgaactctcatgaatgctcaattcgttgataagtcttctggtctctcaacaccatcaaacaatgaattcatggtgttgcttaagcttgtgggtgctccccttattcctcttcaggttccatcagaccata

SEQ ID NO: 90454 - DNA, 252 bp, Glycine max
  Clone ID: 700904474H1
caaggagagaacaagcacagcctcttagaaaagcttcaccgatctgacagcagctctagctcttcaagtgaggaggaaggagaagatggagagaaaaggaagaagaagaagaaggaaaagaaagggctgaaagagaagatcgaggagaaaatagagggtgatcatcatcatcacaaggatgaggacacaagtgtccctgttgagaaagttgaggttgttgaaacagcacatgctgaggaaaagaaggggttc

SEQ ID NO: 90455 - DNA, 251 bp, Glycine max
  Clone ID: 700904475H1
gtggttttcatcgtcttccttctcttatatttctttttttttttgtcttcgccgcacgccgaaacaatggccggaaaaggagagggtcctgctatcggaatcgatctcggaaccacctactcttgtgtcggtgtgtggcaacatgaccgagttgaaatcatcgccaacgaccaagggaacagaacgacgccgtcttacgtcggcttcactgataccgagcgtctcatcggtgatgcggctaagaaccaagt

SEQ ID NO: 90456 - DNA, 253 bp, Glycine max
  Clone ID: 700904476H1
ctttctctctgcgacaccagatgatggagacgacggcgaagcgaaacgctgtcgttgcgccaatcgcggcgttgttgttggtggtgctactcgcggcgagtgtggtggtggaggctcaggagaactcggacgtgaagacgctggtgaagcacatgcacgggaagaagtactgcgacaaaggatgggaatgtaagggctggtcaatttactgttgtaacctcactattactgattatttccagacctaccagtt

SEQ ID NO: 90457 - DNA, 254 bp, Glycine max
  Clone ID: 700904477H1
ccagaacatgggatggagagctgatggtggtctgtggcttcttgttcgtggaggtggtctttatctcagcaagggcaaagggttaactgaagaatttgaggaggttcctgttcaaagccggggttttggcattcttgatgttggatatcgttcaacggatgaggcttgggcagcaggaggaagtggtattctcttgagaactactaatggtggcaagtcatggatccgtgacaaagctgccgacaacattgctg

SEQ ID NO: 90458 - DNA, 260 bp, Glycine max
  Clone ID: 700904479H1
tgtgattccagaccttaatttttctctcattcgcttcaaatttcaggaaatcaattatggctcaaccctcaacaagaataggccttgctggactggctgttatgggccaaaatctagcactcaatattgctgagaaaggctttcccatttctgtttataaccgaaccacttccaaggttgatgagactgtagaacgagcaaaacaagaaggaaatcttccagtttatggctaccatgaccccgaagcttttgttcattcc

SEQ ID NO: 90459 - DNA, 259 bp, Glycine max
  Clone ID: 700904481H1
attaattgcaagaatggcacctcgttgcttggtgatgtccctttctgttctcttcactcttggtcttgcgagagaaagccatgccagagacgaagatttttggcatgctgtttggccaaacactcccattccaagttcattgcgagatcttctaaagcctggccctgcaagtgttgaaatcgatgatcaccctatgcaaattgaagaaacacagtacccgaaaaccttcttctataaagaagaccttcatccaggcaaa

SEQ ID NO: 90460 - DNA, 257 bp, Glycine max
  Clone ID: 700904482H1
gaaggtttctctgttaaaaagcaagccagtacagctataacataccttcattcatggagcaagatacaagttgagattagagctcgccgaatctgtatggtaaccgaagacaagatcaggaggaagaaactggagtctcaattaaaactggaggcaaagcttcatgatctggaggttgaatggtgtggtggttctgaaaccaaggaggaaatccttggaaggatacatgacagggaagaagcagcagttaagcgtga

SEQ ID NO: 90461 - DNA, 254 bp, Glycine max
  Clone ID: 700904483H1
gtagaacccttccactgtggtgactctgcgatgggtactgcctctaccttctttgctattctgcttatgtttttttgttcgtttgtaatttgtttttgttttcattagatctgatgcctgaattgaacgattatttggtttaattgttctgctggagctttcttaagagggtttggggttttaacgccaaagccaaaacaggagaaagaacatcatctcttcgctaacttgaactagcatggatgtttgctact

SEQ ID NO: 90462 - DNA, 254 bp, Glycine max
  Clone ID: 700904484H1
gttttgcactcacaacaaaccaaaaatcagagctagctagcaagactaaaatggcagaaagtgcagtgtccttggcaggtcagcaggcgattccaaaaatattggaagctgtcaaaatgttgagagatctcccaaaagaagttagagacattacagatgaacttgaaagctttcaagatttcatcaatgatgctgataaagtgactgaagccgaagaagatgatggaaggcgtcatagaataaaagaaagggtg

SEQ ID NO: 90463 - DNA, 250 bp, Glycine max
  Clone ID: 700904485H1
ggtttcagaagctaatcgcaggggaaaaagaaagaacaaacattaatatctcgagtattgagtttcggaagcgcttacgacgatcaacttcacgtttattcctaatgcagcattgtccttgaacttcaggtaaaaaatagcagaacattttcatggtacaaggatgtccaatccagcttcaaaagccacttggacacctgggttccatagagtatttgttgatttatgccttggagaaatgctgaagaat

SEQ ID NO: 90464 - DNA, 253 bp, Glycine max
  Clone ID: 700904486H1
ctgaagagcctcctcttctctctcttcctcttcctcttcttagcctcctccgccgtcgccaccgtccccgcccacaacatcacccgcatgctggccgcacaccccggcttctccaccttcaaccactacctctccgtcacccacctggccgaagagatcaaccgccgccagaccatcaccgtcctggccctcgacaatgccgccatgtcctccctcctcgacaagcacctctccctccccaccatcaaaaacg

SEQ ID NO: 90465 - DNA, 251 bp, Glycine max
  Clone ID: 700904487H1
ttcaggaaaagtttagtgatgttgtcaactggctcaaagcaaatgccactaaggcagaaaattcggctgctgatgctagtgctgctttttctgggaaaaagctcttgcctgaagtaataatcaatgaaaataaatcttctggagaaaaaactgggtctactcctgttagtactgctacaaattttactagttcttggagccctggattattttcaaacagtcaaggcatttttggaattggcaatcaaagt

SEQ ID NO: 90466 - DNA, 249 bp, Glycine max
  Clone ID: 700904489H1
atcttgtgttgtgtccctcttttaagctatttccttctcttaacacaattggttgtgccaattgccatagtcaccaaccaattaacaaaggtatatatatcatcatatcatcaccaaatgaaaaatattgggttgttttttcttgtggtggtggctacttttgtggtggcagccacagctggtagcttttaccaagactttgaaataacgtggggtggtgagcgtgccaaaatctatgagaatggaaac

SEQ ID NO: 90467 - DNA, 251 bp, Glycine max
  Clone ID: 700904490H1
cgtgggttgggattgccttatttttcttagctttcacagcctcatgctttgcaacagaggttacttatgatgcacgttctctcattattaatggagaaagacgtgttattttttctggtgcggtccattatcctcgaagcacagtgcagatgtggcccgacatcatacaaaaggcaaaggatggagggcttgatgccattgaaagttatgtattttgggaccgtcatgaacccgttcgacgtgaatatgat

SEQ ID NO: 90468 - DNA, 251 bp, Glycine max
  Clone ID: 700904491H1
ctttttctctattgaggttgtcattgggagcactcaacctaaccattcaagttgtgaaaccacatcgcaagaaaattcacaagcgatggatccgaagctgaaagaggtttctcagctcttcgatcgcttcaaggcttcgtttctccggaacgacttcgataactgttccaatctcctttctcagctaaaggtgttacttacaggtttcagaagcctgccaccgttgtttgcagatacacctaatgcagttc

SEQ ID NO: 90469 - DNA, 254 bp, Glycine max
  Clone ID: 700904492H1
cccaggtttcgtgttttgtgtaggcgtctacgacttgacgctgttttgttgggagttgggattaggtgcatcaattgactgtggcattatagcttattaagagaaagcaacaacatgtggaggctgaagatagcagatggtggaaaagacccatacattttcagcacaaacaattttgtaggcagccagacatgggcgtttgatcctgaggcaggaactccagaggaacgagctcaagttgaagcagctcgtca

SEQ ID NO: 90470 - DNA, 258 bp, Glycine max
  Clone ID: 700904493H1
aaggcagaaagcaagctcatcctagagttttaaaaatggcagcagcctcctccatggctctctcttccccatccttggctggcaaggccgtgaagctgggcccatcagcccccgaagtcgggagggtcagcatgaggaagaccgtcaccaagcaggcctcctccggaagcccatggtacggcccagaccgcgtcaagtacttgggcccattctctggcgagcccccgtcctacctcactggcgagttcccaggtgact

SEQ ID NO: 90471 - DNA, 260 bp, Glycine max
  Clone ID: 700904494H1
gcaagacccgtttggataagggaaaactccagagattgctttgaagcaagatccttgcgttgaccctttcctgaaccagaaccggggggggagaggaaagaaaaggggatccaaatttcccatccatcaataaagtgagggctttccggaccttccccacccctctttccattcttccttcccctctcactccccctttttcaagaaataagccccgctccctaagaaggggcccctctctgataaggaaggaaacgaaa

SEQ ID NO: 90472 - DNA, 260 bp, Glycine max
  Clone ID: 700904495H1
gagaagcactcatcattcttcgtttgtctaagatccgccttctctgaattgtaaaaatgtcgctcggagaaactgcttgttcatacgcagctctcatccttcatgaagatggaatcagtgtaactgccgacaagatcagcaccttgttggaaactgcaaaggttcaagtagatacctattggccaaccttatttgctaaacttgctgagaagaaaaatcttggcgatttgatagccaatgcagcaggcggtggtgcacca

SEQ ID NO: 90473 - DNA, 262 bp, Glycine max
  Clone ID: 700904496H1
catcatcttaagcagcagcaacaacaacctcggaagcaattccaatccctcacaacctccaacatcacccaaaacaccaaacaacaaaagcatgaaaattctaataatagcctccgctgtggccgcatcgttgtttctattattatcattcatcatcggatacttaatcttccgatacgtaagaagaggttccgctgcggaagatagcagcaaccctgaaccttcgagcacgcgctgccgcaacttttctttgacggagata

SEQ ID NO: 90474 - DNA, 270 bp, Glycine max
  Clone ID: 700904501H1
gttcctcttattagcgacggccattctcgccgttgtgtgctccgccgtgagcggttgctcgccatcggatagggcggcgctgctggccttccggaaggcgctgagcgagccctaccttggcctcttcaactcgtggacgggctccaactgctgcctcgactggtacggcatcagctgcgacgccaccaccggccgcgtcaccgacatcaacctccgcggggagtccgaagacccatcttcgagaaagccggtcgctcggctacatgacgg

SEQ ID NO: 90475 - DNA, 266 bp, Glycine max
  Clone ID: 700904502H1
tgccactactaaagacaggtttagacgagagctagatggtgtccattatgaaattcaggctactgaccccacagaaatggatcttgaagtactgagagaccgtgcacattgaaatgtttaagcactgaattcattttcttatcagaatctactaggttttaaagttttacttttaatgaattacctcttcatgctttgtcatcaatagaacccatcttgccacaggaatatacctccactaatatgaatctgaaggctgatgggtt

SEQ ID NO: 90476 - DNA, 268 bp, Glycine max
  Clone ID: 700904503H1
gggattgtttcaggccagaatatgggagaacattgaaacctatttgcctgctacagctgtgccgcattggggtgataatatatgattggttcgacattagctggctgaagaactactacaatttcgggtttgatcactacaacatgtcttggagaaaaatgggcatatggggtcttgttgactgcctattggggaatgcaggtccatttgcttcgggagattggatcctccctgatctcacaattcaaggctctataagactcaacta

SEQ ID NO: 90477 - DNA, 265 bp, Glycine max
  Clone ID: 700904508H1
tgctcttagggaaggaatgggtggtggtggcggtggccatgatccatttgatatgttcagttcattctttggtggaagtccgtttgggtcaggtggtagcagtagaggacggaggcagaggcggggagaagatgtggttcatcccctgaaggtctctctggaggatctttacctcggaacttcaaagaagatctctctttcacgaaacgtgttgtggtcataatgcaatgggaaaggctcaaagtctggggcttcaatgacctgt

SEQ ID NO: 90478 - DNA, 263 bp, Glycine max
  Clone ID: 700904510H1
ggaagctgaataaattaagaattctcagcttttctggatctcgaattgagaatttgccagctgagttagagaacttggataaactacaattactagacatcagcaattgttcagtagtcaagaggattccgcctcagcttatgtcaaggttgacttcgttggaagagttgtatgtaagagattgcttcatggaagtgtcggaggtaggagagagataccagatgtgcaaatttcatctatttctgaactaaagcatttgcatc

SEQ ID NO: 90479 - DNA, 236 bp, Glycine max
  Clone ID: 700904514H1
gctagaccagaccctaaaaagaacatcacaactttggtaaaagcatttggagaatgccgtcctcttcaagagcttgccaaccttacattaattatgggtaaccgagatggaattgatgagatgtcaagcacaaatgcttctgtacttctctcggtacttaagttgattgacaagtatgatctgtatgggcaagtggcatatccgaaacatcacaaacaatatgatgttcctgacat

SEQ ID NO: 90480 - DNA, 263 bp, Glycine max
  Clone ID: 700904515H1
cacgagacgaatctgctttacttacatcaacagatcttaatgattattcagatcatgattgtgattgacgaacttggaactagagtaccgttcagtaactctgatacctttgtcctctgtgtctttcgttcctatggcagttcctattttctcaggagtgcgaggtatgctcacgcgtgtgcgcgcgctctcacccagcaactgcctaactcatcacttcagcccactcaatcgcagatgcactcaaatcaaatcgtagtcct

SEQ ID NO: 90481 - DNA, 267 bp, Glycine max
  Clone ID: 700904518H1
tggatggctatggtacactctaggctaatctgacctgtaccgtccgtaagatctgccattaaaatgaatgaaaggataggattctcggatggaccataaattgaataatgataataaggagtaatgtctaaacagtagattttttttatacatagtatgatgatatgtgaataatagagaattgaagagagagaacaagaacgtggcggaacaatagccatgcccaagaatgtgctgggtaatgctctttcttgtacggacgtataa

SEQ ID NO: 90482 - DNA, 266 bp, Glycine max
  Clone ID: 700904519H1
gaacgaagcagaagaagcatctcagaacagaaccaccgaacccactcagaagcaaatccgaaaacccctcatataatagtactggtattcagctgttcatgacaaaagcctgaaccgatcatgtcagaaggtgcagaaattgatgagcgtgtggaccttgacgaggaaaattatatggaagagatggatgatgatgttgaagaacaaatagatgatgatggagtggatggaggtgaagatgaaaatgctgaaggtagtgttgaaga

SEQ ID NO: 90483 - DNA, 261 bp, Glycine max
  Clone ID: 700904520H1
gaataaatcttatcagaaaaatattcatttgtctgcagttacggtctccatgacctcaaaattagatctctttactagtgattttgacttttggttctattattaccgacagtcctgtgtctccgacaacacaactaagtctttacgactcaatttcattagcattagcgtctcgcaatacgcaggtcgcaaaccggactcgctgcctagtactagcgcactttcattttgccgcttctctgttttcaacaaacgacaaca

SEQ ID NO: 90484 - DNA, 261 bp, Glycine max
  Clone ID: 700904521H1
ttctcttcttcaattcattctagttctggattccgactcgccgcattgactcggtccgggttggggtcgactcagttcggtttttcattctctcgcgaatctaatctataggaaaagctaagggcacatcacaatgaaggcattgattctggttggggggtttggaacaaggctgaggccactgacactcagttttcctaagcctcttgttgattttgctaacaaacctatgattctgcatcagatagaggcccttaaggc

SEQ ID NO: 90485 - DNA, 259 bp, Glycine max
  Clone ID: 700904524H1
ttctttttctctctctttcctctgttctttttttttgccctatctattagggtccccgcggattcaaaccttaattcttctattactctctttctctcatgcgttcttgctctcaacaacaatcacactccgtcatcgaagtcttcgttcttgtctgcttcgttctcctttttgctctcgttcgagggttctttcgtggggaacactgcagatctcaccatccgggtcttattcatccgtgcccatgtccaaagttctc

SEQ ID NO: 90486 - DNA, 262 bp, Glycine max
  Clone ID: 700904526H1
ctgcaagtaaatggcaagagcagcttgcaatcaccttcacttggttcccagtttagttcatcctctaaagtcaaccctcttcacaaatcacactctttccaccacacgcactcgctactatggcattcaccgaagttctcttcttcttcatccaaaataagcatgagcctcaaggctggtattgttggccttcccaacgttggcaagtccactctcttcaatgccgttgtggaaaatggaaaggctcaagctgctaattttc

SEQ ID NO: 90487 - DNA, 259 bp, Glycine max
  Clone ID: 700904527H1
cagccatattctatctctacgccgctaactctctctcactctcgcgctctctctttcacaaccttcactttactctctctgctaaaatgcaaggaggatttcaatcatttttgtcacacgggaatgtcattagaaatgctgttctacaacgggtgcgcatggtgaaccccctgttacagccaattgtctcttcgcggtttgaatctgttacacctgctcgcattgaggagcatggttttgagagcaccacaatttcaga

SEQ ID NO: 90488 - DNA, 260 bp, Glycine max
  Clone ID: 700904528H1
tgctgcattaacctccgcatttgttactgattttccaggtgtgaatggtcttggtgtatctgcggcacggttagacatagccaaaggtggatcaatcccaatgcacacacaccctgctgccactgaacttctaataatggtggaaggtcaaatcactgctggttttatgaccccaactgcactttataccaagacactgaaacctggagatattatggtttttccacaaggacagttgcattttcaggttaattctggaa

SEQ ID NO: 90489 - DNA, 260 bp, Glycine max
  Clone ID: 700904529H1
atttcattgatttctccctcttcgctctctctcagtgaccagagacagatgatgatggagatggcgaacgaaacgctgtcgttgcggcactcgcggcgttggtgctactcgcggcgagtgtggcggtggatgctcaggagaactcggacgtgaagacgctggtgaagtacaagcacgggaagaagtactgcgacaaaggatgggaatgtaagggctggtcaatttactgttgtaacctcaccattaccgattatctccag

SEQ ID NO: 90490 - DNA, 261 bp, Glycine max
  Clone ID: 700904530H1
cggagagagagagacgccggcgggtttggacagtgagtcacgagttaggaatcgtgacactcagacgttgagaaccgcggaatgcctctgaagccgtcgtattcgtcggagaatctgatgcttccggtatcggatcctcctaacgacgacgaccagaagtggcttttgaaagccgacaataacaagaccttccaaacacgaaggattctaactgccatctcttacatgtcatgtgcagtgctctttcgtcttttcacttcc

SEQ ID NO: 90491 - DNA, 264 bp, Glycine max
  Clone ID: 700904532H1
aagacctattcacacatgtgctagtagaaccaataaccaaaccccaacacacacataacacaaacaacacagatcaagtttctcattccctagacagatcccaacaacaacatagacaacacagagaatgcacgcaaagacagactcagaggtaacaagcctcgccgcgtcttcccccacgcgctcccctcgacgccgtcctctctactatgttcagtctccctcacgagactctcacgacggcgagaaaaccgcaacgacgtc

SEQ ID NO: 90492 - DNA, 245 bp, Glycine max
  Clone ID: 700904534H1
ctcgagccgctcgagccgattcggctcgaggacgaattaaagagtgtttctcaagattgagctattgaacgctatgcccacttttgtgtttgtgaaacagggaacgcttctggacaaagtggtgggagcaaagaaggatgagctgcagcagaaaatacagaaacatgtggcttcagctagtgcttaatctagctcaccttcagaaactttatatatgcgctttcttttcataatcttgtactaga

SEQ ID NO: 90493 - DNA, 262 bp, Glycine max
  Clone ID: 700904535H1
ctgccactcattgcttgctgagtgagagagccttttgttctgagttcttggtttctttggttagtgcttctgacaatatattggaacttggtttttggggattggtgcttttttgggggtacccagttgaacatttttttcttcttcttcttcttcttcttctctaacccataaagtcaaagctctcatctttgataagttgtgaacaaggtctatgagttgttccttgtagtgcagagaagggcatggtctttttgttgag

SEQ ID NO: 90494 - DNA, 262 bp, Glycine max
  Clone ID: 700904536H1
gtcgtagtattatttcatcgattctctcccttctctttctctctgcgacaccagatgatggagacgacggcgaagcgaaacgctgtcgttgcgccaatcgcggcgttgttgttggtggtgctactcgcggcgagtgtggtggtcgggggctcaggagaactcggacgtggcgacgctggtgaagcacatgcacgggaagaagtactgcgacaaaggatgggaatgtaagggctggtcaatttactgttgtaacctcactatt

SEQ ID NO: 90495 - DNA, 258 bp, Glycine max
  Clone ID: 700904538H1
caacaatgtgctttgcattgctttcattatcactttaacgtgggcagttgaagctcgaattccggggatttactctggtggtgcatggcaaagtgctcacgccaccttctacggaggatccgacgcttccggcaccatggggggagcgtgtgggtatgggaacctgtacagccaggggtacggtgtgaacacggcggcattgagcacggcactcttcaacagcgggcttagctgcggtgcgtgttttgagataaagtg

SEQ ID NO: 90496 - DNA, 260 bp, Glycine max
  Clone ID: 700904539H1
atttcgttacccttttctcgattcgatcttcagatctgtcgccgacagcaaacatggttgatcaggtccaacaccctacaatcatggacaaggttgctggtcagctccatctccgttctggtctttcatctggtattagaagttatgatggagcctaccgccacccagctatgtaccaaagaccctcttttgggaattactcgaatgctgcattgcagtttcctgtgatgcccacatgcaaagctaccatggatttgtct

SEQ ID NO: 90497 - DNA, 260 bp, Glycine max
  Clone ID: 700904542H1
aaaaaaaacccttagccaacacaaccatcatattaaaatctgctattcagcaatcagcattcactggtcaaactgctctgaagcagctcaatgagttcgtccgcaagaccggtggcgccggcaaaggtcgcactaacatgcgccgcaccgtcaagagtgctcctcagagcatttggtatggccctgaccgtcccaagtacttgggtccattctcggagcagattccatcatacctgaccggagaattccctggtgactac

SEQ ID NO: 90498 - DNA, 259 bp, Glycine max
  Clone ID: 700904543H1
ctgcttcacccgtaatcatcaccatcatcaaggacatctcagcaattaaacaatatacaaaacataatcaaactgctctgaagcagctcaatgagttcgtccgcaagaccggtggcgccggcaaaggtcgcactaacatgcgccgcaccgtcaagagtgctcctcagagcatttggtatggccctgaccgtcccaaatacttgggtccattctcggagcagattccatcatacctgaccggagaattccctggtgacta

SEQ ID NO: 90499 - DNA, 259 bp, Glycine max
  Clone ID: 700904545H1
cggctcgagaattataagcatgggtttgtggaacacaacgaatgcagtgtcttgccgctttcacaagtttggtgatgaccaaaagaatctggtcttccaaggtgatgccacgtcttcttccaggggcatagaactcacaaagttagacggtggaggaaaaccagtgggtggcagtgtggggagagtgttatactcttctccagtgcacctttgggaaagctctacagtggtcgcaagctttgataccgacttcactttt

SEQ ID NO: 90500 - DNA, 260 bp, Glycine max
  Clone ID: 700904548H1
gcgttgcgtggttggttttgcggtatcgaagaagaagagggggaaacaggttgtgccggtgaaatcagtgatctacgcgctttcccctttccagcaaaagattatgccgggtctctggaaggacttgcccacgaagattcaccacaaggtctccgagaattggatcagcgccactcttttgctcggtcccctcgtcggcacctacgcgtatgttcaaaactacctggaaaaggagaagctggctcacaggtactgagctc

SEQ ID NO: 90501 - DNA, 259 bp, Glycine max
  Clone ID: 700904553H1
gtcggtgggacgtgtgttattcgtggttgtgttcccaaaaagattttggtctatggagcatcttttggaggtgatcttgaggatgccaggaattatgggtgggagttgagtgagaaagttgacttcaattggaagaagctcttgcaaaagaagacagatgaaataaacagattaaatggactttacaagcggatgttatccaattggggggttaaattatttgaaggacgaggcaagatagatggtccaaatgaagttg

SEQ ID NO: 90502 - DNA, 258 bp, Glycine max
  Clone ID: 700904555H1
tttgttttgttgttaataaaaattttctcttctttctttctctcttgaagttggaaagaaaggcaaggagagaaagagaaaacaaaaaatggtagtttccagggtggttgtttttcttggtctcattcttgcaacccttgtgtcattggcttgctcccaatccgctgctccggctcctgctcccacaagtgatggcacctcaattgaccaaactgtagcgtatatcctaatgttggttgcattggttctgacttacat

SEQ ID NO: 90503 - DNA, 259 bp, Glycine max
  Clone ID: 700904556H1
gcttgagaatgttcattattcaattcaatgttgcatattattatatatataaaaaaaatggtccccatatacgtgacacgtgtatgcctattacgttgatttactttcttgtataaactaatgtaactaaaactatgattattgttggttggtttgtgctttaatttgttgagcactactccattgtttgtgatcacaaaagatgattatagcctgcaaaattatattcatgcccgtgtatatgtgctgaaattgtaaa

SEQ ID NO: 90504 - DNA, 258 bp, Glycine max
  Clone ID: 700904557H1
caaatctattccatgctcctataagtgagagatgagactgcagtaggtgtgggaactgtggggtcatcggaggcaataatgttggcaggtctagcttttaaaaggaaatggcagacaaagagaaaagcagaaggcaaaccatatgataagcccaacatagtaactggggctaatgtgcaggtttgttgggaaaaatttgcaaggtactttgaggtagagctcaaggaagtgaaactcaaagaaggatactatgtgatg

SEQ ID NO: 90505 - DNA, 256 bp, Glycine max
  Clone ID: 700904559H1
aagagactcacctcctcaacgaagctcaatctataggggtgtcacaaggcatcgatggactggtcgatacgaggctcatttgtgggataagaattgctggaatgaatcacagagcaagaaaggaagacaaggttttcattattttgctctctataatctttagtttaattttctgatttccttcgctttatatgatttattgtcatattaattatcttgggttggttgacaatggcaatggaaaacaactggatgc

SEQ ID NO: 90506 - DNA, 256 bp, Glycine max
  Clone ID: 700904562H1
gacaattcaacttaagagatcaatatggccaccaccactacccagcctccctctaatatctgttttttccttctgttgttgcttctagcacactttcatttgggcataagccaacttgagctgaattactactctaaaagctgcccaaaagctgaagagatcatcaaggaacaagtcacacaactatataaccagcatggaaacactgccgtttcgtgggtcagaaatctcttccacgattgcgtggttaagtcat

SEQ ID NO: 90507 - DNA, 255 bp, Glycine max
  Clone ID: 700904563H1
cttcggcttcgtttttgaggcagttaagtgcaaaaaaggagggatggaaagagagatactataatagtggtagtgcgtggctggggaatgagctttggagggtgtgacgcaagtgtgaaactaatggaagggtttaacatgcaggggaatgtggggaggaagagggtgatggtggtggttgatgacacctcacattccaagcatgcaatgttgtgggcactcactcatgttgccaacaagggtgattccttgact

SEQ ID NO: 90508 - DNA, 207 bp, Glycine max
  Clone ID: 700904564H1
cgcgtacgcaaactccggctccggctcgagcacagggagtggtggcatctggaattgccttcgctgtacaaatatggtgcattgacagaggtggtcctgtgtttgttgacgtctatcaacctgttcagacttttgttgtcgccatcatggcttccattgctttaggagaagagttttacttgggcgggttagtcccttccacacaac

SEQ ID NO: 90509 - DNA, 260 bp, Glycine max
  Clone ID: 700904567H1
caattcttccccctccacccacccagcatatctctctattcctatttattagcacccctcacattaccttgtgtcaccaactactttgactcctttaccataccattacaataattatcaaacctaaccagtaaaaatggtgaccgtggaggaaatccgcaacgctcagcgttcccatggacccgccaccatcttggccttcggcaccgccacgccgtccaactgcgtctcccaagccgattaccctgactactacttcc

SEQ ID NO: 90510 - DNA, 82 bp, Glycine max
  Clone ID: 700904569H1
attgatatatgtgtgtatttcctttgggcttgaaactcaaaactataataatgggttcttcttctcctccggacactagaag

SEQ ID NO: 90511 - DNA, 110 bp, Glycine max
  Clone ID: 700904571H1
ggaaaactttggacaaaaaatggagtgctacacaaggccaaacatgagtgactcgaacctctcagcagaggtagaagccaccatagaagcaaagaccagagagtactttg

SEQ ID NO: 90512 - DNA, 82 bp, Glycine max
  Clone ID: 700904573H1
gagaacttcaactgagggtgagagtgacacaaatctagggagcactactctaaaagttctattagattctacacaacatgcg

SEQ ID NO: 90513 - DNA, 255 bp, Glycine max
  Clone ID: 700904574H1
agatgatcaagtatctgattcttcttctgatgaaagaacacgatcgagcacgcctcaggacaataacactgaagctggaacaggagatggagcgagaaataacaatggtaataaaagcgagttgggtagggaagagagtccagactcagaatcacaaggttggggtcccaataagcttcagaaagtgaacccttccaatcctatggatcaatccactgcagaagccacaatgagaaaagctcgtgtctcagttcg

SEQ ID NO: 90514 - DNA, 255 bp, Glycine max
  Clone ID: 700904575H1
ttccattatgtataaattcataacatagtggttgagcaaacttctaaatcctttgtgtgatatatgataaaatatggaaatttcattatctgattctgttcatctctgttctattgattatgaattagcattttttatgaaaatgattatgcttgttgaggaattatcctttttagattatgcgatctcttatggataggggtgccaatcaaatccagcagcttggttggcccaaaaagagctcagaattgagcc

SEQ ID NO: 90515 - DNA, 256 bp, Glycine max
  Clone ID: 700904576H1
ggcgaccatcaccaccaccaccaccaccatcaagatcacgatcatcatcatcatgatcatgatcaccatcatcatcacgatggagagggagagaccaactcatgggtaggtaaggatgggaaggtgtaccatagccacgatggtctggcgccgcattctcacgaacccatttactcccccggctacttcaccagaagagctccaccgcttctcaacagaaacttcaacgaaagagccttcaacgtcggaatcggtg

SEQ ID NO: 90516 - DNA, 250 bp, Glycine max
  unsure (1)..(250): unsure at all n locations
  Clone ID: 700904577H1
tcctcattaagccgccactttctctctctttccttttcgtcttctttttcttcttcgttgggtttgttgccacttagtaagaaagagggtgtgaagagagtggggagaagatttggtgttgtggccatggcggagtctaagagtactgtgcttgttacgggagcgggtggtcgcacaggacaaatagtttacaaaaaattaagagagaggccanaccaatatgtggctagaggtctggttagaacagatg

SEQ ID NO: 90517 - DNA, 79 bp, Glycine max
  Clone ID: 700904578H1
caaaaaatgcactatcttgctttcaatccaagttcactttggtggcagttgaacgagtttgcaaccccacacaacatac

SEQ ID NO: 90518 - DNA, 256 bp, Glycine max
  Clone ID: 700904579H1
cactttcgttctttggctcttgcgttgagttcttcatcaacctccttgtcctcaacggtggcttcatcatgatcgttattaacttcctcacaggtcacctggtgcgtccccgatcgtaatgcaccaaattatttgtcttgcatcggaaatttggacgcgagagtaaagttggatgccatcacgcgtgatgactgcaggtactatgtttcattagctatgatggcttcaaaggcatcctatgagaatgcagcttacc

SEQ ID NO: 90519 - DNA, 259 bp, Glycine max
  Clone ID: 700904581H1
acttgatcggtggtgtatttggtgtgttgatgttttattaaacttttgtactcttgctttgaaactagttggttaggcaagttttagttttctattttatttcagacttttcaggtgctcatattcttatgatgatcatcaaactgcaaatatagtgagcccattaagctattactgaaatttgttgcagatttgaaattcttctaagatggatacttcttataggactggtggagtcaagtacgagtgcttgcttttt

SEQ ID NO: 90520 - DNA, 256 bp, Glycine max
  Clone ID: 700904582H1
tcgagcttcagcaatggtgtacgtcaaggctcagaaatcaaaagcctacttcaagagatatcaagtcaagttcaagagaagaagagagggaaaaaccgattaccgtgccaggattcggttgattaatcaggacaagaacaaatataacactccgaaataccgatttgtggttcgctttagcaacaaggacattgttgcacaaataatatctgctagcattgccggcgatttagttcttgctacagcatattcacat

SEQ ID NO: 90521 - DNA, 258 bp, Glycine max
  Clone ID: 700904583H1
gtgtaggaggtgattggaagttgttcgaatccagaatccgaaaaaagggcaccaccgtgtcaacaagtagaagcagaagctgtttttgttcttcgccgctgacactaatcgtttcttcaatgccttacgagaaggagttcgccgctgcaaaaaaagcagccatctctcgctgctcgtctctgcaagaaagtacagaaggctcttctgcaatccgatgtgcactcaaagtcagacaaaagtcctgtcacagtggctgat

SEQ ID NO: 90522 - DNA, 255 bp, Glycine max
  Clone ID: 700904584H1
gagtcccttctttgcatgttatccactgcctcagtcccggaccttggctaccggaacggggaggacaactaattccggaagtggcactttccttctcacaatgtgagtgtctcattgtactggtccccttttcttgtgcaaggtgtagctaagtcatactcagggccaaatcataataagttgtatttggatcatgttgatgagaggtgggcctaggatatggatcaaatggccctgattgtgttatcacttggg

SEQ ID NO: 90523 - DNA, 255 bp, Glycine max
  Clone ID: 700904585H1
tagaaacataaaaaactaaattacttttttaaaatataaatgaccaaacttaagttcagctgaaattttatgttgatactgttggagtattagttgatgcctgtagaaaacaaaatctagctctgttgagatcctatgagagaggcataatatatatagccacataggatttccaataattttccaaaggaatgtgcgtgaaacaataaagttttgacttctgcaaataggatatgattattgttgcagtgtggg

SEQ ID NO: 90524 - DNA, 249 bp, Glycine max
  Clone ID: 700904586H1
agaccttaaagtaccaaacttccaactcttctctcttctctcttcactcttcactcttgtcgtcatttcctcacaaaaccagtgttagtaacatctccaccttaacgatgtcggtaaaggagtgtcaccaccacaagggaaagaagcacaaactctggagacgcatcttctggggcatagtgatcttcgccttcatcgtgttgctaacagttcttataatctgggcaatcctaaagccttcaaagccaa

SEQ ID NO: 90525 - DNA, 255 bp, Glycine max
  Clone ID: 700904587H1
tcacactgaacactcttgtagttaatcgaatttctcattccgcagaaaccttcaactctggccgctgaaacgattccctaccagaacggcgtcgttgccagctccaacgattccaccgccacgggcaagcaatcgcgggagaacgaccgccgccgccgccgccggaagcagaagaagaacaacaaggcatctgaggccccggttcctaactcttacgaagagagtgacgatgcgaaagagaacaacgattcaaaa

SEQ ID NO: 90526 - DNA, 246 bp, Glycine max
  Clone ID: 700904588H1
caacaaacaatattattcaatagaaaagaaagaaagatgagtccaacatgggtttttgtgttaggtattattgcagcaatgttggtggttgtgaatggacaatcatcagtgaagccattggtgaagacagtgaaggggaagaaggtgtgtgacaaagggtgggagtgcaagggttggtctgcttattgctgcaatgagactatctccgattactttcagacataccagtttgagaacctcttcgcg

SEQ ID NO: 90527 - DNA, 245 bp, Glycine max
  Clone ID: 700904589H1
gggagaataagaaaaactgttaaaaatattttccataaaagataaaaaataacttgaagtggttattttgtgcataaatatgatagtttaacaatcacttgactcattgttgtttattttggtaaatactttttttaagttttacttttttgttcccatttggtggggtgcattggagccttgcagggaagtaggaggatacatggttatggacttggtttttatagcacacactctcagaaaag

SEQ ID NO: 90528 - DNA, 252 bp, Glycine max
  Clone ID: 700904590H1
aattgtttcaggactaccatcaattggctcccttgaatactgagagaattttaacatgtatttttctctcaggtcctacggttaagaagactattacatatccacatgtttagtacttctgtttgaacactacttttcgaccttgcatatctgaatcaatatatactgtattgtctgtttcactttcaaaaacatcgttattatttcgtagaggattgttgagattttcaggacaaaaaatctatattatat

SEQ ID NO: 90529 - DNA, 251 bp, Glycine max
  Clone ID: 700904592H1
ctcgagccgaatcggctcgagcaaaaatggcggcgaaacttcaaatctttacgggattgcaccccgcgccatttcaatctacttcttcctccactctctgcgtactcaagaagcctctcactacctccttcttcggcaccgcgcgagtggaagttctgaaacttagagtgatgaggattgtgaagcctacgcgtggcggaggtgctctcggtgctcgcatgaacctctttgacaggttcgccagagttgtg

SEQ ID NO: 90530 - DNA, 252 bp, Glycine max
  Clone ID: 700904594H1
aagtaaactaaactgaagaaaatgttgttaggtcacttgcaaaattgaagagatttaagacctctgtcttttctgttgaattagattccataatcttccattagtttccattctgccactttgctacaaagttcttctcctctttggaacacgcaattttaggcctatgcatttcagcaagttctgcaaacaaaattgagagttgttggtttataactacgttatatgtttcattgtctcagttgaaatggt

SEQ ID NO: 90531 - DNA, 252 bp, Glycine max
  Clone ID: 700904595H1
caggaattgacggaggcattcgaaatcggtgaagatggttgctatgaggtttcatcagtaccaggtggtgggaagggctcttcctaccgaatccgatgagcatcctaagatctaccgcatgaaactctgggcaactaacgaggtccgtgccaaatccaagttctggtatgctttcttcttcttcttcttcttttttcaaatgttttttattcgtattcgtactgattcaataatattttttttatgatttgt

SEQ ID NO: 90532 - DNA, 252 bp, Glycine max
  Clone ID: 700904596H1
tcccaatgctagagatttgataccagggatgcttgtggttgaccctatgaggagaatgaccatacctgagatccgtcaacacccatggttccaagctcgacttccgcgttatttagctgtgccaccaccagatacaatgcaacaggccaaaaagattgacgaggagatccttcaggaagtcgtgaaaatgggatttgacaggaatcaattggttgaatctcttgggaacaggatacaaaatgagggtactgt

SEQ ID NO: 90533 - DNA, 191 bp, Glycine max
  Clone ID: 700904601H1
aagagagagagagagagaagaagaagaaggaagcagaggaagaagaaggaggagatcttgagagatcaggtcgcaactgatcatggggagagaagttacaggaatgcaagttgtggacaagaagccaaatggcgtaataccagcttcaaatggtagttctaatgataaagtggacatttctcctaaaagga

SEQ ID NO: 90534 - DNA, 262 bp, Glycine max
  Clone ID: 700904604H1
ggcactgagagagatggtgttgaatgggtggaattggaaatcgaagtgaaaagaacggttgaaagttcaagagtaagatgctattgcaattgcgctgctctcattctcaccacaaactgacactagcctgcagttgaagaaagaatagaggatcgtggtcgatggcgtctgctagccttggaagtggtggggtcggcagttcgaggtctgttaatggtggcttcaggggttcttccagttccgtcgattggcttgcagagag

SEQ ID NO: 90535 - DNA, 265 bp, Glycine max
  Clone ID: 700904605H1
accaactgcattggagcgggttatctggggattcggggatggatctaccattccagtgtttgaaactcccgttggaaaaataggtgctgccatttgttgggagaacagaatgccactgttaaggacagcaatgtatgccaaaggtgtggagatatattgtgctccaacagctgattccagggatgtttggcaagcatcaatgacccatattgcacttgaaggtggatgttttgttttgtcagcaaaccagtttgtaggagaaagg

SEQ ID NO: 90536 - DNA, 264 bp, Glycine max
  Clone ID: 700904606H1
ccgagaaactgggtggttcgatccttggcgcttcgtcacgcaatgaagaatagggttctcacactctccttcaaccgaattcttccctcactcccatcaaaatcctctctcttagccaccaccgccgccgccactgcctcctctcagctctccctcctcccctccttccaccactctcgctccctctcctccgcctcagctccttccgacgttgtccttgttaattccgaggaagagttcaacaatatccttacagagtccgag

SEQ ID NO: 90537 - DNA, 262 bp, Glycine max
  Clone ID: 700904607H1
agaaactgcattcgcagacacgctctgagagagagtattggaaggtttcgacgagtgatgatatacacatattgtgacggtagtgacattcaggacgaagcggtagcaatttgcgatttgcaatgagtaacgaaaaggctccttcatcagcgtctgcgagtagctacgagttgagcaaaggcatcactggcctcgacaaagttattcttcgggacgcacgtggtagctccgctggggtgtacttgtacgggctcacgtgact

SEQ ID NO: 90538 - DNA, 261 bp, Glycine max
  Clone ID: 700904609H1
ctctacgctttctcgttcgagatccctcaagggatccactaactgaaggagaaatggggttgacattcaccaagcactttcagccggcttttcgccaagaaggaaatgcgaattctgatggtgggtctcgatgcagctggtaagaccaccatcctgtacaagctcaaacttggagagatcgttaccacaattcccaccattgggttcaatgtggagactgtggaatacaagaacattagtttcactgtctggatgttggtg

SEQ ID NO: 90539 - DNA, 255 bp, Glycine max
  Clone ID: 700904610H1
gccttgaacttgaactatcgtgtcttcttggctttctctgttcaggatcaacatggatattgtatcacgagctttgctatttccgttggctatacttgtgctcatattaagcacaccttgctcaggtgcttttgggaagagtggaactaatgtgaaaacagctatttttctgtcccccaagtttgaacttggaccaggatcggtagccaataaatatgattatgacgctgattttccaagaggtcattagcactt

SEQ ID NO: 90540 - DNA, 192 bp, Glycine max
  Clone ID: 700904611H1
cggctcgagcgtgaagtgaatgacaatgagaaaaatcccatagaaatggtggtaattagaggcaatagcttggtcactgttgaagtgcttcaaattcaagtatttaagtgtaaattaacaattgttaagtgacctgacaaatgtaaatatggagtaatttatattataattgacatgctgtcatatatttat

SEQ ID NO: 90541 - DNA, 87 bp, Glycine max
  Clone ID: 700904612H1
ctcgagccgatccacagtttctggtatttagtatttacagaaagtggaagcaaaacttgacatgataagcaagaaccagttttcggt

SEQ ID NO: 90542 - DNA, 260 bp, Glycine max
  Clone ID: 700904613H1
gttttgaaacggactcgggctggcaccagggctgctgttttggctgatgaaggacctatcatggaggatggagttgaggaggatgaggacaacgaggatgaagagtatgatgatgactacgagagtgagtacagtgaagatgaagaggatgatcagaacacaaaaaataagcaacaagctgccaatggcactgtgaataaacatggtaaagctgcagaaagttcaggctctgaggaggaatgagaagtttttctaacatg

SEQ ID NO: 90543 - DNA, 256 bp, Glycine max
  Clone ID: 700904614H1
gtgcgattctcaaggaacgaagacaaagcgctggatcgagaatcttgattcggtttgatttttacgtttttgacttctgattcacgcgcttttcgacaagctgatacgctcttggatttttgcgggattcgatcgtatcgtatttcattgcaatcatgactcaggcggtggaggtcctgaaccggtatgggacggatctggttggggagccgagagattctgattctgagtgtttggcgggttttgatgtcttctg

SEQ ID NO: 90544 - DNA, 261 bp, Glycine max
  Clone ID: 700904616H1
aacatcatcatgtcggacgaagagcaccatttcgagtccaaggcagacgccggtgcctccaaaacctaccctcagcaagccggtaccattcgcaagaacggctacatcgtcatcaaaggacgcccctgcaaggttgtggaagtttcgacttccaaaactggaaagcacggtcacgccaagtgccactttgttggaattgatattttcactgccaagaaacttgaggatattgtgccctcttctcacaactggatgttcctc

SEQ ID NO: 90545 - DNA, 262 bp, Glycine max
  unsure (1)..(262): unsure at all n locations
  Clone ID: 700904617H1
tattttcctttttagctttgattagagtggcctagttgttgtttttctcaatgagaagggtttccactatgccatgcgtctggtgncgcntcggggtcccctggtgcacttgctagcttcagttaatgctccctttggtttggccactgaaatgtcaggggatgaagtgagcactgatggaaagggtttaaatgaagatttagcaaaacctaatctacaaggacatgaggaagaagcaaagtttaaaggttttttccaaagc

SEQ ID NO: 90546 - DNA, 266 bp, Glycine max
  Clone ID: 700904618H1
ctggaacaaaatttaaatgagggaccaaaattatgttttagcctaaataatatctctaaatatttggtctttaactgatccgtttgatccatgtagccaacctcacctaatgggacaaggctttgttgttgtaaatattagttgtgttttcatcataagtgaattgtgtgtgtctgtcaattctggtggggtatatggtggctgatattcaggtgagatttttgcaggtttgtatttttactgggtcagttcctttgcagaggttt

SEQ ID NO: 90547 - DNA, 266 bp, Glycine max
  Clone ID: 700904619H1
caacaaacaatattattcaatagaaaagaaagaaagatgagtccaacatgggtttttgtgttaggtattattgcagcaatgttggtggttgtgaatggacaatcatcagtgaagccattggtgaagacagtgaaggggaagaaggtgtgtgacaaagggtgggagtgcaagggttggtctgcttattgctgcaatgagactatctccgattactttcagacataccagtttgagaacctcttcgcgaagcaattcgccggtggcac

SEQ ID NO: 90548 - DNA, 91 bp, Glycine max
  Clone ID: 700904620H1
cggaagaagaggttttcgtttggttaagcaagatggatttggaagcagagaaagagcatgaagctcgcatttgcagtggcctcactctccc

SEQ ID NO: 90549 - DNA, 264 bp, Glycine max
  Clone ID: 700904621H1
cgaaaaccctgaacccaaagggttcgtttgtagcttcttcctccctagacataccgcgttcgccacctggaacccacaactgagtcgtgactcggttctttcacactgaaccatgcacgttttctctaacgctcgccgagcctcttggcttctcctctttcctcatctccgaacctcggaagctcctcactccaccgcgctctctctcttctcagggctcgcgcaacgtgattcccggcaagtgaacaccgtccggtacactgt

SEQ ID NO: 90550 - DNA, 258 bp, Glycine max
  Clone ID: 700904622H1
cttggcttctctcaaagattattcttctttctttttgccctgctctgtggggttagtttctgctctcaaatgctcttggcccttccttacttcttggcctttgcttctgtgtttgctgttgcactttctgggtgtaaggattttcagctgctcccgttgttccttttgtcgagcctgtcatgcctacccttgtcaattatagtggtgatgatgagctctatcatgggggttccttctgtcaaaatccattgatttggg

SEQ ID NO: 90551 - DNA, 261 bp, Glycine max
  Clone ID: 700904623H1
ggattcggacactgaagaaacaaaacccaagcatcccaagaaggagaagaaaaagaagaacaagaagagagaggttgaggttgtaccacctcaatctgaacagattgaggttgaggtcgaggttgtccgtgagcaccccaataaaacacctcctgttgttggttatttcccttccggatttgatccggtcaagaatcatggcggcggtccctccaattttcaagtttaccggcacaggagcatgcacagaggctggagctt

SEQ ID NO: 90552 - DNA, 262 bp, Glycine max
  Clone ID: 700904624H1
gccgtatgcgctagacttgggttgctccaatggaggatacccaagaaattgaggagcaagcacacaaagaagtgatttcagacaaaacatctgagaagcagcaggaaactcttgatgaaattctttcacgacacaggaaagagatattgcaactgcagaaaaaagaagttgagatgaaaaaagctgcagctagaggtagcaaggctgagcagaaagctaagaagaagcaagtggaagaagaggtttgtcactttctgctaag

SEQ ID NO: 90553 - DNA, 64 bp, Glycine max
  Clone ID: 700904625H1
attgaaaatgagtatgtacggtagggatccgggtggaggaacgttggagatccacgccacagac

SEQ ID NO: 90554 - DNA, 258 bp, Glycine max
  Clone ID: 700904626H1
agagaatggctcccaagggtttaacctttctggctgtgttaatatgcgtttcagcactgtcactgagtccttctgttgcgggggaagggcaaaataatggccttgttatgaacttctacaaggaatcatgccctcaggctgaagacatcatcacagaacaagtcaagcttctctacaagcgccacaagaacactgctttctcctggctcaggaacatcttccatgactgtgctgttcagagttgtatgcttcactgtt

SEQ ID NO: 90555 - DNA, 234 bp, Glycine max
  Clone ID: 700904627H1
ggaagatggtgttgccggcaccaattgccctatccaaccaggcacaaactacacgtaccacttccaggtgaaggaccaaaacggtagcttcttctactaccctagcctagggttgcagcgtgctgccggaggcttcggcggcctccgcatcaacagccgccaactcatcccagtcccctatgctgatcccgaggatgactacaccgtcctcgccggcgactggttcacaaagag

SEQ ID NO: 90556 - DNA, 258 bp, Glycine max
  Clone ID: 700904628H1
ctatttttcttcctcagtagtgtcatttacgcttctcttctctgcagcaactatgcctaaccctaaggtcttcttcgacatgaccatcggcggtcaatctgctggccgcatcgtgatggagctctacgccgacgtcactccccgcaccgccgagaacttccgcgcgctttgcaccggcgagaagggcgtagggcggagcggcaagcccctccactacaagggctcgtccttccaccgcgtgatcccgagtttcatgtg

SEQ ID NO: 90557 - DNA, 260 bp, Glycine max
  Clone ID: 700904631H1
aaagcattgaattcaaaaacttaagttcattccttgtgttttgctttcttcctcaaaaccaaacatgtcgaacacatgcggcaactgcgactgcgctgacaagactagctgcaccaagggaaacagctatggtgttattgtagagactgagaagagttacatcgagactgttgtcatggatgttccagcagctgagcatgatgggaagtgcaagtgtggcactaactgcacttgcacggactgcaccgtggccattaagg

SEQ ID NO: 90558 - DNA, 103 bp, Glycine max
  Clone ID: 700904633H1
cacagatgaaatagggatgtaagaacaagagtggcaaggttgtggaaaataaggaaactccaactgcctcctgtgcggattctaagctgattgggatttatga

SEQ ID NO: 90559 - DNA, 151 bp, Glycine max
  Clone ID: 700904634H1
ggcgcaaacaaacgagacctcataaacaaaaactcacaaacccatcatctctcgcattcgaaatttcatctcgcaacaaaacccaccgttttctgcgagaatcatacccacactcaccactctccaatctcccattctcccctgctttctc

SEQ ID NO: 90560 - DNA, 260 bp, Glycine max
  Clone ID: 700904636H1
caatttttctctcaaccggcccaatttagcataagcccagcatggccaccgcaacagcagccgtgacctcgtccttcatggggacgcgcctcctggaggcccactccggggcggggcgggtgcaggcccggttcgggtttggcaagaagaaagccgccgccccgaagaaagtttccagggggtcgggctctagctccgataggcccctgtggtatccgggcgccaaggcgccgaggtacctggatgggagcttgtcggag

SEQ ID NO: 90561 - DNA, 259 bp, Glycine max
  Clone ID: 700904637H1
gtcgctactaagagttgctgcttcttcagccactccgcacctcgcagcctctgtgccctcaacaaccatggctgaaatcgaaactaccgttccagatcccacccaaatcgacgtgagactcttcaatcgctggagcttcgaggattttgatgttaagcatatgtctcgggctgattacattggagtgtccccagcaaagcatgctacatatgttcctcacactgctggtaggtactcattgaagaggccaggaaagccc

SEQ ID NO: 90562 - DNA, 256 bp, Glycine max
  Clone ID: 700904638H1
caaggacctacttgaagccgaaacagtgttcaaggaaatgccacaaagaaacgttgtagccgagtccgcaatgattgatgggaatgccaaagttggtcgcttggatgatgcccgtaatgttttcgacaacatgacccagaggaatgcattttcctggacaagtttgatttctgggtattttagttgtgggaaaattgaggaggctttgcatttgtttgatcaaatgcctgagagaaacgtggtgtctggactatgg

SEQ ID NO: 90563 - DNA, 257 bp, Glycine max
  Clone ID: 700904639H1
aaccgaacaatccgatatttgcttcctattggaatcaagtattaacccttttctctctgaatactctctactcaatacattgcttgctagtctcgtttcaaatattaattttaggttcttcgttacgcgttgtgttgcgttgtgcgtgagaaagtgcgcgtggtgaaaaagcatggcttctcagctcctgagacgaaccgtcggaagtcgtttccttgcaaaccctagggccttctccgccgctgcttccactccga

SEQ ID NO: 90564 - DNA, 211 bp, Glycine max
  Clone ID: 700904640H1
cgaattctgatcgcttttacgcgagaaagggggaccaccctctaagcctaagtattcctcaatgaccgatagcagtcagtaccgtagggaaaggtaaaagaacctatttagggatgcaatagagaactgagatccgtgcgacatcgtcgaagagttacaccttattgaatttataaacgatcactctaacggcgtacctttcatgatgggt

SEQ ID NO: 90565 - DNA, 82 bp, Glycine max
  Clone ID: 700904641H1
attctgcatctcacggcaattgtataggtcctccaagcaagagagacagcgagaggaaaacgaaaccagtggagagaaacaa

SEQ ID NO: 90566 - DNA, 250 bp, Glycine max
  Clone ID: 700904642H1
agagagtgatttcagtgagtgatcggtgttcacttgatctcatcataatcgtcagcgtcaattgaagaagatgccgatcagaaacatcgccgtcggaaggcctgaagaggcgactcaccccgacacgttgaaggcggctttggctgagttcatctcaaccttcatcttcgtgttcgccggctcaggctccggcatcgcctacaacaagctcaccgacaacggcgctgccacccctgccggctcatctccg

SEQ ID NO: 90567 - DNA, 174 bp, Glycine max
  Clone ID: 700904645H1
tcggctctagcagagtctagcgatgagtgcgtttctaaaagccttcgtggccattctctggggtgttctgtgtctgggtcgccatgagggagcggtagaagataagagcagatagattggtagacgtggcgaaatcagagattccgtataggttcgagcagcatgcggtggggt

SEQ ID NO: 90568 - DNA, 162 bp, Glycine max
  Clone ID: 700904646H1
gtaaggagagcacagcaatgaccaatatatattgcagagtggttctagtaatgcagtgctgctagaagatgggaactagtgaatggcaggatcgatcgaagatctagcgtcggctctgaatgccccttagcaagagaggcaggagatgtgcctgaaactggg

SEQ ID NO: 90569 - DNA, 253 bp, Glycine max
  Clone ID: 700904647H1
gaaagctaaagactcgtccaacagggtttaaaccttacaaaagatgttcggtagaggccaatgaaaacaggatcggaacagcctgcaaccaaggtgaagaaaaaggtcctaagagaatacgcttgaatggggaggcttcaacttgatgcttgatatatccatgcaaccacacaaagaaaatctctagttttgcatatattatttcttagtttccttgttcattgtctgtattgcttattttctattctgcagc

SEQ ID NO: 90570 - DNA, 249 bp, Glycine max
  unsure (1)..(249): unsure at all n locations
  Clone ID: 700904648H1
ctcttgacatggctacgcatacgccaaaaaatatcctcattacttgcgatgtgggantcatcgcatctcatggttgcgatcggcttatccggaattacccccagtacagaattgttgttcttgacaagcttgattactggtcaaatctgaagaatctcattccttcaaaatcagcgcctaacttcaaggttgtgaagggggatattgggagtgctgatcttgtcaactaccttctcatcactgggccat

SEQ ID NO: 90571 - DNA, 261 bp, Glycine max
  Clone ID: 700904652H1
gcacaattctctcttatcatctgtgttattacctctttccaaaatccaaattgtctagttccaccaaaccaaagcagcccagtatggcagcagcctcagcctcatccatgatatcaacaccagccttatctccaaccatccaaaagcaccatcatttgaagccatccaacgtgtgcttccaaggtcttagacccctcgcaaggttcaccaaagcctcatcagccaaagtgagcaccaccaccaaaagggtattccaaaggg

SEQ ID NO: 90572 - DNA, 257 bp, Glycine max
  Clone ID: 700904653H1
gttgtgaaaggttaagatcgagaaattagggtgaagtgaaggagaagctctagacaagctgacttgaaagttgaaacagaagatgggagaagcaacagaaagatatgcagttatgacgggtgcaaataaaggaattggattagagatagttagacagttagcttcagctggaatcaaagtgttgctcacagcaagaaatgagaagaagggtctccaagcactggaaacactcaaagactcaggtctacccaccttgt

SEQ ID NO: 90573 - DNA, 252 bp, Glycine max
  Clone ID: 700904654H1
gttgcgtgcttggagaggagtacagatgaagggaaagtggggatttcacttcagaaggatctcatggcgattgcaggtgaggctctcaagtctaagatgactactatgagtgctcttgttcttccggcttccgagcatttggctgttccgtctcagtctcattgggaggaaaatcttcaaccccaaatggaagccttagatgcgtgacttcatacaagcctgggagcacttctgcatccacgctggtggacg

SEQ ID NO: 90574 - DNA, 104 bp, Glycine max
  Clone ID: 700904655H1
cgacgtgcgtggactctttgaaggtggaattcatctccctacagatgcactcagtaaaattagccccctatcagtgctcaaggaaatcttccgcactgatgatg

SEQ ID NO: 90575 - DNA, 246 bp, Glycine max
  unsure (1)..(246): unsure at all n locations
  Clone ID: 700904656H1
tatcagcagcagcaccagtgctaagggtgtcatcggtaccggtattatcatcagtgaaagtgtcatcgacaccgtgactgctttagcgtcccacatatccatccagcttagcaatcatagcaaggctgatgtacatgagaaaggtatacttggacaggctacatgattttcaaggaacatacctcgggcnaccttngcanctnncnaagatncatacgatcttaattttgaatgggacagtacttc

SEQ ID NO: 90576 - DNA, 252 bp, Glycine max
  Clone ID: 700904657H1
gatactttgtgacatccctcccagacttgctagtcctgaatgcatgtgcaatgatgactctcatcatcacacttcctaattttgtgcatttgataccaaagcttttgttccaaagattacacggaagcaatgctagttttggcaatatgattttgatcccttgcgaattgcatgaggtgtcattttccacggaaacaacagctcttaagagcatcatcttttaagatgcacaatgtcaacacgcctatccct

SEQ ID NO: 90577 - DNA, 249 bp, Glycine max
  Clone ID: 700904658H1
ccgacgccttcgacgtcgccgccgaattcaatgcctccccctacgtcttctacccctccacagccaccgtcctctccatcgccctccacctccccaccctcgacaagcaggtccagtgcgagttccgagacctcccggaaccggtcaccatccccggttgcattcctcttcccgtcaaggactttctagacccggttctggagcgcaccaacgaggcctacaagtgggtgctacaccactcaagcgcta

SEQ ID NO: 90578 - DNA, 252 bp, Glycine max
  Clone ID: 700904659H1
caacttctctgtaaatgttagcaacaatggctacattagtgctaatgaccccttgaactggggtgcggcggcggaggctatggctgggagccacctcgacgaggtcaagcgcatgctagaggagtaccggaggcccgtcgtcaagctcggtggagagaccctgaccatctcgcaggtcgcggcgatcgcggcccacgaccagggggtgaaggtggagctggcggagtcctccagggccggtttaaggccagc

SEQ ID NO: 90579 - DNA, 158 bp, Glycine max
  Clone ID: 700904660H1
atttggaccttgagaacaatctcttgtttggtaatttggttgattttcaacagcctttggttttgctcagtcttgcttccaatcagtttgctggttctttgccttgctttgcagcttcagttcagtctctaactgtggtgaatttgtccatcaattct

SEQ ID NO: 90580 - DNA, 252 bp, Glycine max
  Clone ID: 700904661H1
cagaggtgaaacaaaccaactacccacctatggcggcctctgttgtagtgtctacctctctgtctgtgtgtttcaactatggctatcatcgtcgtccatccatttccgctctctcttgtcattcgaattccatcaccaaaacaaacctaaaactcagttcgcaatgtttctccaactcgaattcggtagccccgatttattgccgcaagtttgttgctcgcacttcaattggagaaaacgaagcgagaggag

SEQ ID NO: 90581 - DNA, 208 bp, Glycine max
  Clone ID: 700904662H1
atgaaggtgaagaagggttggctcgcggttcaagtggaagaagaaggtggcggtggagggtctcaaagatttgtgatcccaatttcgtactttataccctctcttcaagcacttttggataggctatgagttatggtacacaccgaggtctctaactgcagtcagtcgtgcttctcactcgtgagatcggagatcctccatacaccac

SEQ ID NO: 90582 - DNA, 233 bp, Glycine max
  Clone ID: 700904663H1
ttcggctcgatagtaatctctgggacttctggtctgtttggtagagacgagaggcatagagtagatggaaataactaggatgagtgaaaataggtgtaaataaagttgatattaaatgtgttttgtggaagagaaataaagtagagacgaagaaagagatattgaataagtggaaattagtgtgaaatagtatactaggtcccgtcatgtttaaaattagttgcacctttgtc

SEQ ID NO: 90583 - DNA, 247 bp, Glycine max
  Clone ID: 700904664H1
cgcattcgctaatttcaccaatgtatgttgtatggtgacgatggtctctgcaggctcttcagctttttgctaatgatattgtgtgtttggagtgaaaggggacaaggctagttgagcttgattgtgttgttcaacagtgaggacaggccagagacagtgtggaaggaggaggagtagaagttgatgtctctggcttcagagaatgcttgtctcggtcctggtgggatcctgaggttcgtcgcttgct

SEQ ID NO: 90584 - DNA, 151 bp, Glycine max
  Clone ID: 700904665H1
gtgtggtgtgtccctcttttaagcgagttccttctcttaagacaattgtttgtgacaattggcatagtcagcagccaattaacagagatatatatatcatcatatcatcaccagatgaaaaatattgggttgtgttgtcttgtggtggtgg

SEQ ID NO: 90585 - DNA, 259 bp, Glycine max
  Clone ID: 700904666H1
tgcacaagctcttgtatcatcatcatctcttaccttctcagccgaggctacaagacaaagtcttggaccaagatcactccaatctccatttggcttctcaagaaaagcctcctttcttgttaaggcagctgctaattccccttgttaaagcaagatcagacagacctttgtgggttggattcaaggcaaagtctttcctacttggatggcagccttccggggaataatgaatttaaccctcgggaactccggaccctga

SEQ ID NO: 90586 - DNA, 275 bp, Glycine max
  Clone ID: 700904668H1
accgaacactcttcttcaatcaagcgaaggtggtctcgattgcaagtgatccacgatacactctacgcttcacaaaaccttcaaacgcaattccacagaatacatctgatgacaccatgccaccaaagcctttacactatgggtcaataaatgatacaacgtgaagaagagtgcaatattgctgtgcagaggtggaattgataccttgcgagctgtcatgaagcttcagaagagaggtgcaaaaagattgatgctttactaatgttgggcaaccc

SEQ ID NO: 90587 - DNA, 254 bp, Glycine max
  unsure (1)..(254): unsure at all n locations
  Clone ID: 700904669H1
catttttgctttaaggagttcagtcctattttgctcctcttccttgtcttccacacaacatacgaggcgacancngtcgnagntcgggtctgagagttcgcaggcatgttaccaagcctttaattaagccgccaattagaagaggcaattttctcaagacagagagagaagaacatcttggtatcagtgttgcatccactctctgatggggggaggtgagggcggtagattggatgaatcaggatcgtgggctg

SEQ ID NO: 90588 - DNA, 255 bp, Glycine max
  Clone ID: 700904670H1
aacccgacacgtgttccaccacactttcctcgtcagtcttgctatgtctctgcaccaaaactcagtgttctgatgctaccccagaacacaagcaccatggacatgattcctgggaagatccgaaaacgaggctgttcctcctccgcctcctcctcttcctccgtgctccacaactaccgcttcaagaggactattctcgtcggaaagcggggcggatctagtacgcccgtgcccacgtggaactcatgagctcga

SEQ ID NO: 90589 - DNA, 252 bp, Glycine max
  Clone ID: 700904671H1
cgccatccaattgatgggtttcttcttcatgacagtcttcatgtttgctcttgctataccttacaatcattggaagaaccacaacaatattggctttgttgttatgtactcattcacattcttcttctccaactttggtccaaattccaccacatttgttgtgccagcagagattttcccagcaaggctaagatctacttgtcatggaatctcagctgctgcaggaaaggcaggagctatgttggtgcattt

SEQ ID NO: 90590 - DNA, 251 bp, Glycine max
  Clone ID: 700904672H1
caaaaagaaagaatcccaggcgaggagatagatggaggggaaggagcaggatgtgtcgttgggagcgaacaagttccccgagagacagccgattgggacggcggcgcagagccaagacgacggcaaggactaccaggagccggcgccggcgccgctggttgacccgacggagtttacgtcatggtcgttttacagagcagggatagcagagtttgtggccacttttctgtgtctctacacaccgtcttaac

SEQ ID NO: 90591 - DNA, 246 bp, Glycine max
  Clone ID: 700904674H1
attggtccttgtctcttgaattgagcatttgctgcgaaattttgaagattcaagtattcaacgttccagaagagttctttgtatacatttatatatagcacctgaaattggctttggagttcttatactgtttgtttgtttggttttgaaattctggattttggattgtgttctgctcagttttgttaaggagaaagtggggtttgagagtgtgggcattatttattattagcggtttggttcaca

SEQ ID NO: 90592 - DNA, 250 bp, Glycine max
  Clone ID: 700904675H1
ctgtctacctaatttgttctgatctaactttggcctaggaagcccaccattgggttttggtgggctttcattgaaccaataaaaaacccatctttaaaaggtgttttgttttgaaggttccaatttgcttcctgtgtttctttccaacaaggaagggagggtgtgtaattaatttgtgtcaagtagtgagtgaggtcatttttggttttgcttttccccttgttagccattggtgttgcacaattggcat

SEQ ID NO: 90593 - DNA, 221 bp, Glycine max
  Clone ID: 700904676H1
gaatcggtgagatgaatcacaacaacaacaatagagcgaggtaccctcccgggatggggcttgggcgcggtggtttcaatccgaacccgagccagaacccgaacttgaaccagaacccgagcctgaaccagaatcatcacgcgttccaggctcggccaccgtaccatcaccagcaacaacgggtgcagtacgtgcagaggcatttgctgagcaacagcagc

SEQ ID NO: 90594 - DNA, 251 bp, Glycine max
  Clone ID: 700904678H1
aacactttccacttgtctccgaattagttatcttgagaaacattattcccattgctatatattatggctagcatgaaggttacatgggtggttgtgatcatgtgcatggccgtggtgggtgcaccgatgatggcgcaagccatgacatgcaatgatgtgacggtgaacatggcacagtgcctatcctacctgatgcagggaggaacaccttcaacactttgctgcagcggagtcaagacattcttggctct

SEQ ID NO: 90595 - DNA, 249 bp, Glycine max
  Clone ID: 700904679H1
ggttgagtagttcttcatcatagtcttaaacattaaaccttagcaaaactcaacaatgctagacatcaaaggctacctcgtactcttcttcctatggttcatatcaaccattctgatacgttccatcttcaagaaaccacagcgtctaagactcccaccgggtcctccaatttcaatacccttgctgggacacgcgccatatctccgttcactgctccaccaagcattgtacaaactatactgcgctat

SEQ ID NO: 90596 - DNA, 250 bp, Glycine max
  Clone ID: 700904680H1
atcaagacaagcaacgtgatgcagagggcgaagacggtaacgatgataaaggggacgatgatgacgatggagatggtggatttggggagggtgaagaggagttgtcatctgaagatggaggtggatatggcaacaattccaacaacaagagcaactcaaagaaggcacccgaaggtggcgcaggtggagcagaagagaatggggaagaggatgaagacgaagatggtgatgatcaagagatgatgaggat

SEQ ID NO: 90597 - DNA, 216 bp, Glycine max
  unsure (1)..(216): unsure at all n locations
  Clone ID: 700904681H1
gtagtagtagttgtagcccctgcctgagattaactatatactagttgttagttacttacttacatacatagagatagagtcaatggcaattgcagctgcaaactcatcacccaccatgagcctcagccatagccagagccaagaggatgccaccaccgcctccacgagcaagaagcctatcgncgtcgacgataatgatgatcacgggcacgacat

SEQ ID NO: 90598 - DNA, 256 bp, Glycine max
  Clone ID: 700904682H1
aagaaatcgaaagaagggaggagaagggtgtcaatggcagagtgtttgggtgtttcagtttcaactcttggctcattctctcttagtaggcccacaatcttttatcgatctcccattaatatctctctctttgcctctcaatctcatttccctgctgctgcatttggttatttgacaccttccaacccacacctgtacgccgctgtctcctccgactccaaggccgctacttcgctagacctactcaacccgatct

SEQ ID NO: 90599 - DNA, 255 bp, Glycine max
  Clone ID: 700904683H1
cattaagcttggttcatcaaaaggcctcatcacttgaagggttactatatactacttctgtgactgaaaagtgagctgaggtgtataactgcaaatgggtgtttggtggtggaagctgtttgttgctgctcttgctgggattctcttctcaacccaatattgtgcttcccaaaaagttccaaactacacatttatttacaatgcaacgacagcaccagacgtatcatactacgactacatcgaattggcggcggc

SEQ ID NO: 90600 - DNA, 80 bp, Glycine max
  Clone ID: 700904684H1
aacacaaggcagaaagcaagctcatcctagagttttaaaaatggcagcagcctcctccatggctctctcttccccatcct

SEQ ID NO: 90601 - DNA, 252 bp, Glycine max
  Clone ID: 700904685H1
tgtcgtccctagaacaaacaaagagaagaaaacccgggaacgcaacctagaacaaaaacgaagcagttgaagatggagcacgacgaagacgaagagccacctcttgctgttcagattcaagggaatgatgaatccgtttctcagcaatcttcttctgttggggtcactctcatcaccggttatcttggttcgggcaagtccactctagtgaatcatattttgaattcgcaacatgggaagagattgctgtca

SEQ ID NO: 90602 - DNA, 251 bp, Glycine max
  Clone ID: 700904686H1
tttcactttccatttccatttccattttttctggttcactttctcgatggcctccgagaaccccaccgccgacgacgccgtcaacggcttcaatcggccggaaatgttctcggaaaacctcgccggcaccgtcgacgcctacgaccgccacgtgttcctctgctacaagagtcacctgtcctggcccccgcgcatcgaggcctccgacgccgatcccttccccaagcgcgtcgccgccacttcaaagcccg

SEQ ID NO: 90603 - DNA, 247 bp, Glycine max
  Clone ID: 700904687H1
tccttctcctggatgtggctcccctcactctcggaattgaaactgttggtggagtcatgacaaagttgattcccagaaacactgttatcccaaccaagaaatctcaggtgttcaccacctatcaggaccagcagactacagtctccattcaggttttcgaaggcgagaggagtctcacaaaggattgccgccttcttgggaaatttgatctgtctggaattcctccagccccaagggtacgcctcaa

SEQ ID NO: 90604 - DNA, 248 bp, Glycine max
  Clone ID: 700904688H1
tttctctttctcttttgcattctctctgaattcgtatgccatggagtcacccggtaacgagcatgtggtgggtggcgcagaacccaacgacgtcgttacgcccttttcccacagagaagaacctcacaattcccaacccctcaccggccacggtgccagtcccggaaagatatttataggtcatttagcgagagaaacgaccattgcccaatttatcaagcactttggtaagtatggtagatcacgga

SEQ ID NO: 90605 - DNA, 245 bp, Glycine max
  Clone ID: 700904689H1
caatcatgtgaaggacgaggcaagaaggaagtgttgtgggaggaaagaggcagagctgcaatcaccagagtggaagcgcgaaacggtcctccccggctttccattttttctcttctgatgaaattttagttcatcccagttgctgattgagattgaatttaaattcgaaaaagcgtacttgtgccactgtacttttacagatctgcggctacgggctagcctatcgtatttttgcgtagatctag

SEQ ID NO: 90606 - DNA, 245 bp, Glycine max
  Clone ID: 700904690H1
ccaatgtgaacccaagtgaagttggggatattgttgtaggtagtgtattggctcctggagctcaaagagctagtgaatgccgaatggctgcattttatgctggttttcccgaaactgtgcctgttaggaccgttaataggcaatgttcatctgggctccaggctgtcgctgatgtagctgctgctataagggctgggttctatgacattggtattggtgccggtttggaatcatgaccactaatc

SEQ ID NO: 90607 - DNA, 231 bp, Glycine max
  Clone ID: 700904691H1
aaagaaatgacctgaagtctctatatattccaggtaacgaagaccttagcaacccaatgaaagcgtaaccatgaacggcacgtgtagcggagtactaggccgccgttacacgctactgctgtccgtcgtcaccgtttgaattacccaccgctactttgtcgtcattcttcttcttcttcccttttcattgaccttttccttccttcgtcctccaatggcgactgttccgca

SEQ ID NO: 90608 - DNA, 245 bp, Glycine max
  Clone ID: 700904692H1
accttatctcacccttctttgactgttctcccacaccacacccatgacactcctcctgctccttattctcctctttcacgcggcggaagccaccggacagtggcagctcctccacaaaaacatcggcactgtcgccatgcacatgcagcttctccacaacgaccgcgtcatcatcttcgaccgcaccgacttcggactctccaacctaaccctccccgacggaagatgccgcaacacccaaacga

SEQ ID NO: 90609 - DNA, 244 bp, Glycine max
  unsure (1)..(244): unsure at all n locations
  Clone ID: 700904693H1
catagctcaaaccgttttacctacatttcaatctgcatttggtttaaatgccgagtttgataggtttgacgacgtgcgtggactctttgaaggtggaattcatctccctacagatgcactcagtaaaattagccccctaccagtgctcaaggaaatcttccgcactgatggtgatacactcctcaagtttccacaanctcatgtctacaaagnnagtaagtctgcatggatgactgatgaagaa

SEQ ID NO: 90610 - DNA, 248 bp, Glycine max
  unsure (1)..(248): unsure at all n locations
  Clone ID: 700904694H1
accaaacaaagtcctaaaagaaaaccagcaataacaaatagtaatagtgaataacagaggatgtaaaaagcctcacactcagagtcacagaatcctcgcgcccacaagcaaaacagagacanaaaaaaaagcagaaatgggatcattcccaaaagcaaaacccaacaacactcacaccgacaccaacaccaacaccagtaacagggttatgggttttctcctagttttctttccggagagaataacaa

SEQ ID NO: 90611 - DNA, 208 bp, Glycine max
  Clone ID: 700904695H1
atcgactcacccaacgctttgtctaccgctccggcagcgggtagtaggaagaacgcgacgctaatttgcgtcccaataatgggagaatcagttgaaaagatggagattgacctggacaaagcgaaagccggaggcacggaccttgttgaaatgcgattggattgcttgaaaacctttgacccctatcgagatctcaacgctttcagtc

SEQ ID NO: 90612 - DNA, 248 bp, Glycine max
  Clone ID: 700904696H1
catttttcttggatttattgctagctcacaaggagtgcaggttgatccatagaaggtcaaagccattcaagattggccaacccccaaaaatataagtgaggtaaggagctttcatggcttagcaagtttctatagaaggtttgttagaattttttgcactttggctacacctctaaatgaaattgttaagaaaaatgttgtttttgaatggggtgatcaacaagagaaggcttttattgctttgaaag

SEQ ID NO: 90613 - DNA, 291 bp, Glycine max
  Clone ID: 700904702H1
cgcatgcacgcgtccgcgagcccagtgccacgcttgaattttgactgaagacaaagttagaacaaaacaacatgtcttgctccgtcgcggtttccaattcgccggtgttctctccttcttcttccctcttctgctcgaagccctccatcatctcttcttcgccggaatcctctccctctctctgtcgcatctcaaaccttcgaactcttctacgtcgtcgtcttgttcttcgccttctgctgctgctgcttcttcttctccttcttctccgtttcgacttcgccttcccaa

SEQ ID NO: 90614 - DNA, 243 bp, Glycine max
  Clone ID: 700904704H1
ggcacagcacaccgcaggcctccctcaacatctcaactttgccttcgatctcactctcaggtgttgttgaagcttcctgtgttggcttggtatccctgcaagttctgctgtagcagatccccaggtgaaggtgtcatgtcaaatttctttcatgtttgaacaggctatcatccatttgggagcaactgagctgcttggagagtatctctcttcctctaggaaaaattacacaccctcaccaca

SEQ ID NO: 90615 - DNA, 258 bp, Glycine max
  Clone ID: 700904706H1
caagcagatcaatctctctctctctctcaaccataatagtcatgggtttgaaggaggattttgagcagtacgctgagaaagcaaagactttgccaccgactcaatcaaacgaagacttgcttatcctttatggattgtacaacaggccaccgttggacctgtcaacaccagccgtcctggaatgttcaacatgacggacagagctaaatgggatgcatggtaagctgttgaagggaaatccaaggacgaagcaatggg

SEQ ID NO: 90616 - DNA, 256 bp, Glycine max
  Clone ID: 700904707H1
atctaaggaaggaaatgctgccgagacactctacaaatttatgagacctgaagacactcctgttcagtatggaggactgaatcggcccagtgatttgcagaatggtcgctcaaaacctgcatctgagttcacaatcagtggggtcataaagtgtacatacatatagtacgtattgaggctggtgcaactatcacatgggacattgtagctggagtgtgggacttggaatacagtgctgagtttgtgccagatgctg

SEQ ID NO: 90617 - DNA, 222 bp, Glycine max
  Clone ID: 700904708H1
aatcgaaaagctcctagaaagtggtcgtgccttccttagcggtgatctggagtccatcgacaagaacttaactcggctggttggcgtcctgcagagtgtgggtgccggggagtgctggcacaaacacggcagcttccttcacacctcgtcgacccacctcgcattctcaagctctggaaagcccctcactctgtctgcctctgtggcctcttccacacaaca

SEQ ID NO: 90618 - DNA, 249 bp, Glycine max
  Clone ID: 700904081H1
gggaacacatagatgaactaattttctcaaacaaaaataagcctccccttgcatcagataccccaagatttgtgtcactcactttgactttgctagccctcacatactttgtggctgtggccatcccaaatatatggtttttttttcagttcttgggatccacaaccattgtttgcacctcattcatcttccctgccgcaattgttctaaggtatactactaccaatttccctgctttttataatatac

SEQ ID NO: 90619 - DNA, 250 bp, Glycine max
  Clone ID: 700904083H1
gattattatagcaatggcagatcaaaaccagaaccatataactgaagctggaaggcatcaagaggttggctacaagagccttctccagagtgatgctctttaccagtatattctggagaccagtgtctactcaagagaacctgaatccatgatagaactgtgagagttgacagcagaacacccattgaacatcatgacaatctctgaagacgaatggcaattcttgaacatgctccttaagctcatcaat

SEQ ID NO: 90620 - DNA, 253 bp, Glycine max
  unsure (1)..(253): unsure at all n locations
  Clone ID: 700904084H1
agaacatgcttagaaaactgccaagcccacccatattccctcaanactttcaaccatgaactgaacaacaacaaccacaaccacaggccccccccganagacccacctccaacgagatcacttctattaccaattttccgactacacagagcccattctttgtgggcatctcttcaaaaatgtcaagcttccccaacacggtggcggaaggccgcaggtccggcaacgcaccggaaaacatccaccttttctc

SEQ ID NO: 90621 - DNA, 159 bp, Glycine max
  Clone ID: 700904087H1
ggaatattcctagcaaactgccaagcccacccatattgtctcattactctcaagcatgcaatggccaacgccacagcagctgccacctcgtactgcatggggacgtgtctcctgggggcccactccggggcggggcggctgcatgcccggttcgggtct

SEQ ID NO: 90622 - DNA, 247 bp, Glycine max
  Clone ID: 700904089H1
gcctgactctttacctggactcgctgcagaataagtctccttctagaatagccagtggtcctcactttgatagggaatgtcattgggcatgaaactgccactattagcgatggatatctcgttggtcctgttgttacaatcggtactggctgtgttgttgcatcaggtgtcatgctttcacgctgcacaattatgataggttttctgcgtaacaagcatacttgcatatccaacagtatcatatggt

SEQ ID NO: 90623 - DNA, 248 bp, Glycine max
  unsure (1)..(248): unsure at all n locations
  Clone ID: 700904090H1
caacgacctagggaacagaaccacgccgtcttacgtcggattcactgacaccgagcgtctcatcggtgatgcggctaagaatcaagtcttgatgaacctcatcatcaccgtcttctanttctttgggntgattggtcgtagattcagcgattcctctgttcagagtgatatcaggttgtggcctttcaaggtcattcctggtgctgctgacaagccaatgatcgtggttaactacaagggtgaagaga

SEQ ID NO: 90624 - DNA, 248 bp, Glycine max
  Clone ID: 700904091H1
gtggtggggttggcattcttggcattgcatgggcctttggtggcatgatcttcatccttgtctactgcactgctgggatttcaggaggtcacattaacccagcagtgacatttgggctgtttttggctcgcaaggtgtctttgatccgagccatcatgtacatggtggctcagtgcttgggtgctatctgtggagttggtttagttaaggctttccaaaagtcttacttcaacaagtatggtggtggg

SEQ ID NO: 90625 - DNA, 247 bp, Glycine max
  Clone ID: 700904092H1
tgtgccttcattctcgtcgatctctaataatgttgccttatgtttcgcttccttttgtaatggttctgtctgatggatttcgttccctttgttatctgcccttgctttacaattcaaagtaatcaaaggagaaaaatgtttggttgttttatgaagcaactgaacagtatcaaagatgatatattgcgcaataaaacaaccaaacatttttgatactgttcagttgcttcatgtgatcattgcttgt

SEQ ID NO: 90626 - DNA, 249 bp, Glycine max
  Clone ID: 700904093H1
tctgaagcgaaacagattcgcaaaaaaaaattaaaaaatcccaattctcttcgcaaaaatcgaaatcaatgtcgaaaactccgaaggagaaggaaacggaggagcctctgccagaccacctccgctgcgggcgcagcgacgggcggcaatggcgttgccggcggcgagtgaaggagaatctgaagctctgcgagattcactacctccaaggtcgccaccgccagtacaaggagaaggttcccgagtcgc

SEQ ID NO: 90627 - DNA, 242 bp, Glycine max
  Clone ID: 700904103H1
aatgtctaattatggttacgcttacagtaaccaataaccatgggagtcttcacctttgtcgtccgcaaatccggcagcgaatgtagcgccaagcaacattccggcgacatcgaggcctccgccgattccaccttcgatctccaacggaagctcgtgcaagccgctctcgccgttgattcctccggtggagttcagtcctctttctctcccgtgtctcctacctccgctgtgttccaggtgat

SEQ ID NO: 90628 - DNA, 231 bp, Glycine max
  Clone ID: 700904104H1
cacactgcagcgagaaccaaagaaaaaaaaagcttcttccattttccgaaatcgaagcattagggttagggttttttccgatctgagaaattcgcggcccaatggcggaggaaccggagagcaccgtcaccaccggcgccgccgacgaatcgctgctcgataagatcaccgagaagcttcacggccacgattcttcgtcctcttcatctcccgagtccgactccgactccg

SEQ ID NO: 90629 - DNA, 237 bp, Glycine max
  Clone ID: 700904105H1
gtttattatggtgtatggtatttgacatactattgtgtcattgtcagtagactagctaaaagtttataccattcaacaaagggtgtattacatgagaatcgtcaggatcaaatatgcatttggcctgagcggaagcacaagtatcagaaaaatcctttgttgaatggtatacacttttagcgagtgtattatggtgtatggtattaacatgctattgtttcactgtagtaatgggtt

SEQ ID NO: 90630 - DNA, 245 bp, Glycine max
  Clone ID: 700904109H1
gtatggttatagtggaaggctaaagtggctcgagaggttcgcatatgtgaacaccacaatctatccagttacttccattccccttctcatgtattgtaccttacctgctgtacgtctcctgactaacaagttcattattccacagattagtaacattgcaagtatatggtttatctctctctttctttccatctttgccacgggtatccttgagatgaggtggagtggtgttggaattgatgagt

SEQ ID NO: 90631 - DNA, 142 bp, Glycine max
  Clone ID: 700904110H1
tatcaaacagggcaagggttttgttgtcaaagtggagcaaactatttgcaaggaaccatgtaataaagaagcccaatggtgttaagacttctagtgatggtcataaagagatgatgctttctcggagtattggtcaacttat

SEQ ID NO: 90632 - DNA, 246 bp, Glycine max
  Clone ID: 700904111H1
gaaatggcaacaagcgaagaagtggttgctacgcgcggaggagccgcgccggaggagggttgaagcacaaactggagagaaaatggacgttttggtgcgacaaccaatccaaacccaagcaaggcgctgcttggggaacctctcttcgcaaggtctacaccttcgacaccgttgaagagttctggtgtttgtatgatcaggtattcaagcccagcaagttgcaaatcaatgccgattttcacttgt

SEQ ID NO: 90633 - DNA, 175 bp, Glycine max
  Clone ID: 700904113H1
taagagtgaagacggcagatcgcgaagtctagatctgatctgagagaatgcgtcctcggtctagctgcgaggacgcccaagaccttttccgcgctctttggtctgcttgtgctgcaatccccactaatctcaagatcattgatctctatgtcatctatgccgtgttcagcgcttt

SEQ ID NO: 90634 - DNA, 212 bp, Glycine max
  Clone ID: 700904114H1
ctcgagccgattcggctcgaggtgagctgtggctttgcagggaactagagtgtcagtagaaaataaatgtcctcttcccagggacactctctatttcacagatctatatctaagtgtcggactatccctgttctccttcctcgctgagagacaactacaattacgctggcgcgactcgatttggtgaagcagcaactcgtcaccacaagcgg

SEQ ID NO: 90635 - DNA, 195 bp, Glycine max
  Clone ID: 700904115H1
aagaagttctcgtttaagacatccccagatcctggacagaagtctcggcaacgtgatatcatatgtggtggcatgggaaagaccaactcatcaaggatatggactatgacgacattgtttcccacatcgacgatatgcactatgcaagtggatagacctcacagggagacccactcacagctcaagtgcaagaat

SEQ ID NO: 90636 - DNA, 174 bp, Glycine max
  Clone ID: 700904116H1
gaaagatcatagacagagaattcgtctttcttggcgaacagctaaaaacctctgagggacagtatgcatctaatataggtgttcttcagaggtttcagtgcaccaagtgatgactagactctctgactgacggggcagtagaactaagagcacgtcccaacaagcatcatcatt

SEQ ID NO: 90637 - DNA, 229 bp, Glycine max
  Clone ID: 700904118H1
gtgatttcagtgagtgatcggtgttcacttgatctcatcataatcgtcagcgtcaattgaagaagatgccgatcagaaacatcgccgtcggaaggcctgaagaggcgactcaccccgacacgttgaaggcggctttggctgagttcatctcaactttcatcttcgtgttcgccggctcaggctccggcatcgcctacaacaagctcaccgacaacggcgctgccacccc

SEQ ID NO: 90638 - DNA, 188 bp, Glycine max
  Clone ID: 700904119H1
acttgaagcattgcattctgctatttaattccactacgtacacgctccgtctcgtcagagacaacaatggcaccaacaggcaatactctggcttacctgagccaggagagaaccctaggatacgagctcgctcggggacgacaagaaggtgccaagggtgccgacaatgaattgcgcggaagtggatc

SEQ ID NO: 90639 - DNA, 112 bp, Glycine max
  Clone ID: 700904121H1
tcgaaaaccaaatccctaatattctctctcttcaatggcgccgcagagactcaacgattacgaacggaatcggctcgagaacattcgccgcaacgatgaaatgatggccggc

SEQ ID NO: 90640 - DNA, 91 bp, Glycine max
  Clone ID: 700904122H1
attcatcatcaaatggtattccaatgcagtaaccaccaaaaactcaccccctttcacctgccaagtgttacctctcactcgggctaatctg

SEQ ID NO: 90641 - DNA, 219 bp, Glycine max
  Clone ID: 700904123H1
cgtacgtgaactctgagttctgctctcgttgcaacctgtcataaggtaccgactataaccgtgactagtcggatctatctgagctcagaagacaatcccatctctacaagctctactacgactagaatgcttctgccaggaatcaatagagaacagaacctacacccgtcgagttatcggaggtccttgacattagatcaactctagaatgctatgacc

SEQ ID NO: 90642 - DNA, 248 bp, Glycine max
  Clone ID: 700904124H1
ggaaaaccttattctgataaagattctgaattagttgaatctcctgcttccaaaggttctgtgattgcacatgaaatgacaccaatggaagttctggttcgcaataacaccaaggatatgatcaaaatgagtcttaatattacatgcagagatgtagctggggaaaattgtgtagatggtaccaaagcaactgttctatggactggtgttctgagtgatattactatggaaattcccccacttcaaca

SEQ ID NO: 90643 - DNA, 208 bp, Glycine max
  Clone ID: 700904125H1
gaagtgagaaggctgtgcaatgcaccataagcatctcaactcatgtctgcgttttccgtaaaatgtaatatttgattattagatttcttgtactaaaagtttgaataactaaagctaaattttttttccaagttgtaaaaaaaaaaaatggaagataaaaaaaaagaaagtggtggcctcttctcaagtggtcctttgggcagggtat

SEQ ID NO: 90644 - DNA, 251 bp, Glycine max
  Clone ID: 700904126H1
ctgatatgttgcaaacagatgatgaaggaatatcagcatgatattactaagttatgagcagctttagctgtggacacaatacccatttgtatttgttccctcacattttggatctgtacattgctattgactactatatttcccttcatgctccatctccttggtctcactggggtctttggattattcgttatctggtgcatcattccatggatagttgtctacttgctagttcctgaaatacagggcat

SEQ ID NO: 90645 - DNA, 172 bp, Glycine max
  Clone ID: 700904127H1
atgtcctaatctttctgcaccatcgttctccatttttggctttacaaaaccactgtgtctgattaagggttctttaatatttccaatatttcttgtagtgaaaaagttgttagctaaaagaagaccaagtttttgagtgtctgtagataggaagaggatatgaattaacatg

SEQ ID NO: 90646 - DNA, 247 bp, Glycine max
  Clone ID: 700904128H1
gagaagtgagtctgggaatctcattcagtgtttgagctgtcagagggagttcttctgcatggattgcgtaaaagagcggtattttgacactcaaaatgaaattaagaaggcatgtccagtttcttgtggaacttgcacttgtaaggattgctcagcaagtcaatgtaaagacagtgaaagtaaggaatatttgactggtaagagcaaagttgatagaatattgcattttcattatttgatctgcatg

SEQ ID NO: 90647 - DNA, 257 bp, Glycine max
  Clone ID: 700904130H1
tcgagaacgaggcttccaaaatgttttggtatgcaagatgcattgacaaggttgtttccttttctgctgtgaagtttatatgaatatatgtctccgttatgaatgaaatggtagccgtggaacaataaatataggaagatgttcctgtgtcattattgagcaattatactgtcaggactgtagcacagcctcagcttaagctcttgacatataaacttgattagcatgtgatttgtttgtgtatcagtatcagtttt

SEQ ID NO: 90648 - DNA, 221 bp, Glycine max
  unsure (1)..(221): unsure at all n locations
  Clone ID: 700904131H1
atgatctctgcctttataaaatgggtggaaatctttatcaacgaattgaaaaggagtgtgaagcacatatatctgcagcactgcagtctttggttggccaaagcccggatttggttgtttttctgtctctagttgagagatgttggcaggattctttgtgaccaagatgttgatgatccgtggtatagccttgtttctgacaggacaatgtngaagcaaac

SEQ ID NO: 90649 - DNA, 228 bp, Glycine max
  Clone ID: 700904132H1
tgctagttcagcatgagatgcagcaacaattccgaagccttagctccagggaacttggctccaactctgccactgttgctgctgccgctgccgccgctggttcccctgccaattcttggtcaaatatgggagtctccaactgcacgcgtgacttggcctacaagtcatattaactatggaagcatcgatgatcaacgtcaatttagcacgggtactacaggtagcagc

SEQ ID NO: 90650 - DNA, 94 bp, Glycine max
  Clone ID: 700904133H1
gttctatttgtaaccatcggtgtcagcgaaagttgagctttgttttagcggtgtacaacgtgttctcgctggttgaccttctacacaagatacg

SEQ ID NO: 90651 - DNA, 182 bp, Glycine max
  Clone ID: 700904134H1
atcgtgaggagaatatgaagttgtttgttttctttgttgctgcagtagttgtggtagcatggccatgccatggcgcaggctaccaaaggttccctctccgaatgaaaactggctatggtgagcgttcttcggaggtaaaatgcgcaagttttaggcttgctgtgggagcacacaacatccga

SEQ ID NO: 90652 - DNA, 202 bp, Glycine max
  Clone ID: 700904135H1
aatttctaattagggtttcgcttagagtaaccaataaccatgggagtcttcacctttgtcgtccgcaaatccggcagcgaatggagcgccaagcaacattccggcgacatcgaggcctccgccgagtccaccttcgatgtccaacgggagctcgcgcgaaacgctcttggcgttggaacccccgggggagttcagggcccct

SEQ ID NO: 90653 - DNA, 226 bp, Glycine max
  Clone ID: 700904136H1
cacactgcagcgagaaccaaagaaaaaaaaagcttcttccattttccgaaatcgaagcattagggttagggttttttccgatctgagaaattcgcggcccaatggcggaggaaccggagagcaccgtcaccaccggcgccgccgacgaatcgctgctcgataagatcaccgagaagcttcaggccacgattcttggcctctcatatccgacgtccgactcgagccg

SEQ ID NO: 90654 - DNA, 242 bp, Glycine max
  Clone ID: 700904138H1
atgaattccatagatgtagaggggtcatttagaaatgtctctggcgctgtggagtctcaatgtacagacaaatcccccaagtcttttccattgccaaatcatatgcctcaagagacaaatggtgctggtggagcatctcttgttcagggtataaaccagaaatgtgagggaaaggacatacctactcctgtgtcttaccagcaaggactgcctgttgatgttcctcagatttctgtgaatga

SEQ ID NO: 90655 - DNA, 248 bp, Glycine max
  Clone ID: 700904139H1
tattgatgtaataatatccccaagtaataccatgaatttttgttaatgtaataactctttgtccttgccctctctacacagaagatttatggataaaatttgcaaatttggtatcactgcagcactgttccgtcgcggatttcttccaccgacaagtgtttgacttcgtggttccgtcgctttttcaacccttcgatagattcattccttggttacgctttctggctctcaaataacattcaagctac

SEQ ID NO: 90656 - DNA, 121 bp, Glycine max
  Clone ID: 700904140H1
ataaacgataatattccatcctcgtttgtttgcgattccctctgacttttctcattggagggcgaacatccaatcagagatttcggtcatagaagaatatggcttcgtcttccaccagtga

SEQ ID NO: 90657 - DNA, 192 bp, Glycine max
  Clone ID: 700904142H1
ttctcgtgaacggtacctcactgggatcgccgtcgctgctgatagcggtggtgacggatcctccgacgtgtagttcgcggaatatgcacttctctgtgcgtccctcgcattttggatctgcacattgatagtcacttcggtatttcccttctcgctccatctcggtggtcttaccggggtctttggattatt

SEQ ID NO: 90658 - DNA, 248 bp, Glycine max
  Clone ID: 700904143H1
agctggtaacgaaagccttcagatcattaaatactctccttataaaccctgcaccatgatatcattatcatcaccttggtttgttctaagagtgttttatgtgagagtgtgtggcattcaggttgatgaatccaccccagagtttctctctctcaaccatattcctcttagtcctgatacccttttagaggtgaatggtgttaggagcagcatttactctgatggagaagagtcttcagttctgagaa

SEQ ID NO: 90659 - DNA, 96 bp, Glycine max
  Clone ID: 700904145H1
cgcgtacgagatctgggaattgggctcgtcgcaatcattccggtcggtcgcgaaatcttgacgtgatttgtcatgacattgtaatggtcgacatgg

SEQ ID NO: 90660 - DNA, 195 bp, Glycine max
  Clone ID: 700904146H1
gtggagatggctctctagacttatctccttttacttgctatctctcaatctcgctactgcagcctctgattacccagctccctctacttatccctgtgaggacattagccattacccttcttctgtgaagcattttagattcagaggtgaagcactcaaaagacgattgaatagcatcgttgccccagatcattc

SEQ ID NO: 90661 - DNA, 148 bp, Glycine max
  Clone ID: 700904149H1
acaaacacaacaattgcccttcgagtgtcgagtgagatcagaatggccgacttgatgagaagaatcctcctaatggaggccgagcaagcaagcaaatggtccaaacatgttacttcatccatcaacagtggctatcgtcacaacatag

SEQ ID NO: 90662 - DNA, 143 bp, Glycine max
  Clone ID: 700904150H1
tatctctttgtctcttcggctggtcttggcatctccgcagcacgaccacgtaacatacagatgataccaggtactatctctctcgacagagagcctggagcggagaaaaaaaaccagcgactaacaaggcggttttagcagcg

SEQ ID NO: 90663 - DNA, 146 bp, Glycine max
  Clone ID: 700904151H1
ggtaggcgtagctgctcacagattcgatgcgcatgcaccttgttttcgacatgcaggtctccggccaggtcccctgtggggatcacgtcagtctccacgtcgctgagtcagttgtgagtgacgctctatctggaggggcacgagcc

SEQ ID NO: 90664 - DNA, 254 bp, Glycine max
  Clone ID: 700904153H1
actctcttcgctcgtcgtcaaagaattcctatcttcatgctaggctggccttgctcgcaggcctggttcctccgtacttatatcgtcgacgcctccgcttactcttcaacgctttctgggattccttttcggctctgaccatggcgacgtcttcgtcatcggcggtggtcccggctgctatgtggccgtcatcagtcccgcgctgtctgtctatccaccacttgcatcgatgagcgtggcagtctcgggggtac

SEQ ID NO: 90665 - DNA, 143 bp, Glycine max
  Clone ID: 700904154H1
cagaggtttgatatgcaagagttgctcagagcctctgctgagattttgggtagtggttgcttcagctcttcttacaaggctgccttgttgaatggcccatcaatagtggtgaataggttcaagcagatgaacaatgtcgggaa

SEQ ID NO: 90666 - DNA, 194 bp, Glycine max
  Clone ID: 700904155H1
cttttccgatgtacggaaccgagaataaccgagatgattcggaacgaacggcgttcagaagagcagagaagaagtacaagctctactacgactacaatgcttcttccaagaacaaaaagagaaaacaacctaaacccgtggacttagcggaggtccttgactttagatctatcgagaatgcagcaccaaaacgc

SEQ ID NO: 90667 - DNA, 249 bp, Glycine max
  Clone ID: 700904156H1
accccatctagtaacatggggtgtgttgccagcagtgtcatgtcgacgcagattggattccacaggactaatcatttctcactgggcctatcttcacaacaaacaccatataggtctctctctggggagattcatgctatttctccggcgagccgtggcggtggcggcgatgtatatgaggggcttgcacaacggggatttctagtatgcatagttgttctttgggtttccaattagtttgaaagcaac

SEQ ID NO: 90668 - DNA, 243 bp, Glycine max
  Clone ID: 700904157H1
catgggtttgtggaacacaacgaatgcagtgtcttgccgctttcacaagtttggtgatgaccaaaagaatctggtcttccaaggtgatgccacgtcttcttccaggggcatagaactcaccaaagttagacggtggaggaaaaccagtgggtggcagtgtggggagagtgttatactcttctccagtgcacctttgggaaagctctacagtggtcgcaagctttgaaaccgacttcacctttt

SEQ ID NO: 90669 - DNA, 244 bp, Glycine max
  Clone ID: 700904158H1
gtgatagtgagggtcaacagaggaggaacaatctctataaatagtagtagatacccaggcaacctcagattatactctcaacttggttcgttccgtgtgaatttgtgcaaacacaatagacagatggatcagttcaaaggacagcctcggcttccgggattcgtcgttccgaaacgctatgacattaggctcaagcccgacctcgtcgcgcaccgttatgcaggatccgtcgtcgtcaacctcg

SEQ ID NO: 90670 - DNA, 247 bp, Glycine max
  Clone ID: 700904160H1
tctggtgtttgatcttgaaaagggttccattctttatattgatctggcaaaatcaaactctagatctaaacgcacaaggatagatgacgagaaggctggcgcggataagaaagctagaggccttacaccatcatgggccactcctgattctggtaagatgatgttgttggcttggttttagtgcgttgaggttgtccgtgtatatggcttgcgtgaagtttctttcagtttactattgttgtgctac

SEQ ID NO: 90671 - DNA, 249 bp, Glycine max
  Clone ID: 700904161H1
gaaagctttcactcagacaagttggtggaggatggttagctcaggattcagatgactcaaccccacatgacatcaagttcaacgtagtctctgagaaggctccacaggatgatgagcttcgtgatgcagagtttgcatggttgtgtgtgaagcatgtcaaaagcaatgctattgtgatagctaagaacaattgcatgttaggtatgggaagtgggcaaccaaaccgtgtcgagagtttgagaatagcaa

SEQ ID NO: 90672 - DNA, 251 bp, Glycine max
  Clone ID: 700904163H1
taaagttcagttttttgcatcgtttttattaaaatttgttggcgaacaaaacagagaaaaaaaaaccaaaaaattgaaatttcttatccgttttggcgaattgaactgcgtgttcaattgggttgttgaattcgaggcagagggaaccgcgggtgtacaaggaatttcgattctgctgttgttagaaacggtgtagtttggtgtgagagaagctggggacttggggtggtcgtaacgacgtcgttgacgga

SEQ ID NO: 90673 - DNA, 162 bp, Glycine max
  unsure (1)..(162): unsure at all n locations
  Clone ID: 700904164H1
ccgacatcaacttataataattcctaatcagtgacaagtgttatggaggcagagccagacaagtacaagatgatcaactttgaagaaaccgagttgcgactcggcctgccactcagtggaaacgagacgacgcgcaaaaacacgttcagnatcgtggaagag

SEQ ID NO: 90674 - DNA, 248 bp, Glycine max
  Clone ID: 700904167H1
ggtattcgggtcgagcaatatcatcctgatgcgttaaaatggcagtggctactcgattgctctcccttgtcgatcgttggtccggcagcgagtgaagctgggcgcatcattccggggagttcggagggtccgcatgttgcacattgtcactacgcaggcctcttgcggaagccgatcttgccgttgattcctcgtgaagtgcttaggcctattgttttgccgtgtctcgtactacctcactggtgcat

SEQ ID NO: 90675 - DNA, 238 bp, Glycine max
  Clone ID: 700904168H1
gttgtttcacagagcgtggtcttatcaactatggcggagtaacagaacttggagaattcaggctagaaggcgattctccatgaggtctaggagatgcaatcaaacccttccgagtgactacatgagcctacctcttgaggaaaatatatttgaatcgcaatttgcgaatcagggggcctcgtgatactgaatttgaaggtcgtaatttcagggatcggattagatgccttcagaatat

SEQ ID NO: 90676 - DNA, 243 bp, Glycine max
  Clone ID: 700904169H1
agaaactccgttgttaccgttttgctttgttgaagattttttgaggttattcgcgttttcttcttttgcatgttcatttctccgtcgatcagtgaagtgtgaaacgacgccgtttcgttgctctcggctcgaactgatggagtgggtttctctgtgatctcgagggggagttcggcgatgtgtgagctaattcggtgcctggtgtttgattctgttttcgggtttgcgcatttttttgctcga

SEQ ID NO: 90677 - DNA, 238 bp, Glycine max
  Clone ID: 700904170H1
attgtgagggcattgggaatgcgatcgtgcatctcggctgttggagctggtggacaatgccctcctatacgtcctatttcgcctgaatcggacatggatggtggggagaagacaaggttaaggggttcctcttccgttgatttcagagtgcctgggagggtgttgttgaatgggtcaagcgatgatgcgtccatgcattgcaagcaatgaagaaaagtgatcaaccgagctgctatgc

SEQ ID NO: 90678 - DNA, 214 bp, Glycine max
  Clone ID: 700904171H1
tggcctctgagagatcctttgggaataaacgccagaaaacccaaagttttgttcttcctctctttgcaatctctacacagaagatttatggataaaatttgcaaatttggttcactgcagcactgttccgtcgcaaatttcttccaccgacaagtgtttgacctcgtggtccgtcgcttttcaacccttcgatatgattcattccttggtacgc

SEQ ID NO: 90679 - DNA, 242 bp, Glycine max
  Clone ID: 700904172H1
atcttcttcttctttcatggatgctttgaacttcctcaagttctggagaaacgccagcacgaccacaacctccgaaacccacctcgtggtagaatccgacatcgaatccgacgaagaagactcattcttcgactaggagcttacgccacacgagtttcacaacatagaaaacacgaccacaaccaaaactgacgacgaaccaaaacacacggcaacaacaacatcaacgatctcaaaagcat

SEQ ID NO: 90680 - DNA, 248 bp, Glycine max
  Clone ID: 700904173H1
ctggggatggagattgagtttgggaggtgctatggtccctgcccttataatcacaataggatcactagtccttccggacactcccaattccatgattgaaaggggtgatcgtgaaaaggccaaggctcagcttcggagagttcgcggcatcgacgatgtggaagaagagttcaatgaccttgttgcagctagtgaatcctccagaaaagtggagcacccgtggaggaacttgttgcaaagaaagtaca

SEQ ID NO: 90681 - DNA, 244 bp, Glycine max
  Clone ID: 700904174H1
gcttctgcatgggacttggtgtgattccaaacatcttgtgttcagaaatcttcccaacaagtgttcgcggaatatgcatttctatttgctccctcacattttggatctgcacattgatagtcacttctttatttcccttcttgctccatctccttggtcttactggggtctttggattattcgttgttgggtgcatcattgcatggatatttgtctacttgaaagttcctgaaacaaagggcat

SEQ ID NO: 90682 - DNA, 247 bp, Glycine max
  Clone ID: 700904177H1
ctcgagccggccagtccgagaagcctgacgtcacttataatgacattggaggatttgatatacagaaacaggaaatccgtgaggctgtggagctaccccttacacatcatgaactatacaaacaaataggtattgatcctccccgtggtgttttactgtatggaccccctggcactggcaaaacaatgcttgccaaagctgttgcgaatcataccactgctgctttcatcagggttgtgggatctga

SEQ ID NO: 90683 - DNA, 248 bp, Glycine max
  Clone ID: 700904178H1
gtggagatggctttctagacttatctccttttacttgctatctctcaatctcgctgctgcagcctctgattacccagctccctctacttatccctgtgaggacattagccattacgcttcttctgtgaagcattttagattcagaggtgaagcactcaaaagacaattgaatagcatcgttgccccacatcattccttgtcctacagagaggtgtgggatgccctcaaggttcttgatgctgctgata

SEQ ID NO: 90684 - DNA, 251 bp, Glycine max
  Clone ID: 700904179H1
ctgcttcctcatttgcaccaactattctcctaaagatgcccccaacatcatttggcatggctctcctaatggtctctggcatctcactcctctcatcttttgtgggcttctactcccaactcacacacttctgtttcctcacccacatttctcttctactagcctcattaataggacaagtgctgaccatattagcccttgttaccaaagagaaagctagcatgtcccttctgaagtcaccaagggacccc

SEQ ID NO: 90685 - DNA, 252 bp, Glycine max
  unsure (1)..(252): unsure at all n locations
  Clone ID: 700904180H1
tttttgttcccatttcacccctcgtctttccttgtttccggtgagggccaaccacaacatatgttaaacaaggaacaacctccaggacataacatcctacgccaaacaaaactttgacctccttcagagttagacccgtcgtgcgtgtgcgcgtcgaatttcgaantcttcantatgggcacggagggtcgacggccacaagagtggtttacccaacgcagtgggggttcaccgccntgcgttttccggcga

SEQ ID NO: 90686 - DNA, 186 bp, Glycine max
  Clone ID: 700904181H1
gccgaacttgggtcgtttcactaatccccctgattggcaggaaattcttacctattttcgtggatctgatctgcagagttattgtactcggattctacaggcttgtttgttggctatcatcaagcctctgtatgttgaccatatgccatcagctgtgcaagggtatgtggggcaggtgctagacca

SEQ ID NO: 90687 - DNA, 236 bp, Glycine max
  Clone ID: 700904182H1
gtttttgtgtaccgagcgaaacaaagaaaaagaaaaggacagaaacaaacacacacacacggagcgcggaaccaaatgaaatgattgagaagagagagcgaagaaaaaaaacagagccaaaccaaacctttcccgaaacggttcgttttgcccttcttcggaaccctcccttctgcgccgctgctgctgctccggtcgccgtcgggagtctccggtaaccgaagaccactgccgat

SEQ ID NO: 90688 - DNA, 242 bp, Glycine max
  Clone ID: 700904184H1
tagcatgttgtatggtatttatcttattattgtcgcattgtactaaactagctaaaaattgataccactcaacaaaggatgtattagatgtgaatcgccagcatcaaatatgcatttagcctgacggaagcacaagtatcagagaaatcctttgttgaatggtataagcttttagctagtttattatggtgtatggtatttaacatactagtgtctcactgtagtaatgtgttttggacgtg

SEQ ID NO: 90689 - DNA, 237 bp, Glycine max
  Clone ID: 700904185H1
aaaagaaagatagatcatattcatggcgatggcaagcctggctcgacggaagggttacgccgtcgtaatgtcgtcgaggtcgtcgttttgtctgacaagctggaggggattcgtgtccggatctgacgaaaacgacgtcgtcgtcatcggcggcggtcccggcggctacgtggccgccatcaaagccgcgcagtcggtctgaaaaccacttgcatcgaaaagcgtggcactctcggc

SEQ ID NO: 90690 - DNA, 233 bp, Glycine max
  Clone ID: 700904186H1
gcacagaacagttgaagtgactggcatagaaactgcatgttgcagagaaaggagagggtccagtggtgttgttcctccacggcttccctgagctctggtactcatggcgccatcagattctctctctcagctccctcggctaccgggccgtcgctcccgatctccgtggctacggtgacaccgaagcaccagcttcaatcagcagctacaactgcttccacatagtgggtgat

SEQ ID NO: 90691 - DNA, 220 bp, Glycine max
  Clone ID: 700904187H1
atttgatgtgtctttactcaccattgaggagggtatctttgacgtgaaagtcactgctggtgacacccatcttggaggtgaagattttgataacaggatggtgaaccactttgttcaagagttcaactgaaacaacaagaaggacattagtggaaaccccagagcacttagaaggttgcggacatcttgtgagagggccaacataacactttcatcgact

SEQ ID NO: 90692 - DNA, 237 bp, Glycine max
  Clone ID: 700904188H1
caaaatcttcatattcatcaaactcatcaaaatgaatctgtaccactcctccagcaccaccaccaccaccaccatcttcaccgtcatattcctcctccttgcaatatcattcactctcacaccccacaaggccaacggtgccacgtgtcaccctgaggaagaagcgggcctgttgggcttcaaatccggtatccgatccgacccgtccggcctgctcagtaactggatatcgggtac

SEQ ID NO: 90693 - DNA, 245 bp, Glycine max
  Clone ID: 700904191H1
ctgaagtgagggaaaggagaataaaccctgtcaaataaattttgaagaaccagtctatcagttgtagataccaagtggctaagaatataaatcatactggtaaagggggatacatgtatattgttttgtcactctctctctaacataactattttgttccacaagaaactgaatccagggtaaattgaagataaattgttgaagctcaatgtgttctaattctcaacttttccccttagcagcag

SEQ ID NO: 90694 - DNA, 196 bp, Glycine max
  Clone ID: 700904192H1
tatgcggtcagcggatcgtgatgtctatccctcgtgtgaacaaatgcttcttcagcgttattatgacgagctctctgaggtatactgcctagcttacgtctcacagtacaggaatcgtaatgtaactattcattcattacctatataatatatatttgtgaggaatgcacaatattgctagctgttatgcttattc

SEQ ID NO: 90695 - DNA, 139 bp, Glycine max
  Clone ID: 700904193H1
tgaccgttgtagaatgcataatattataagacggtcacatgtccgcaatcgtctttgaatgtatggcattctacgactgtcacgtgcaaatgaccgtgttagaatactcaatagtctacgatagtcgcgtgcgaagacc

SEQ ID NO: 90696 - DNA, 90 bp, Glycine max
  Clone ID: 700904194H1
cttaactccgaagacccccgcttatagtagtccaggcctatttgccgggtgcagtcctatcacgggacatgggatcgacctcgtcatcgg

SEQ ID NO: 90697 - DNA, 177 bp, Glycine max
  Clone ID: 700904195H1
tattcacagctgtcacgccgtgaacggaaaatggcaactgcgagactcagtttcccgcctatcaccgaatgcaacggaatcacaccgtgcgaatctgtagacgtcgacctcgacagtacgctacttatctcccgtagctcgttcccgcacggtcatctcggctccgtcgaagccggc

SEQ ID NO: 90698 - DNA, 243 bp, Glycine max
  unsure (1)..(243): unsure at all n locations
  Clone ID: 700904196H1
aatggtggcctcaaattggtctacctaaagatcaaggccctccaccttacaagaaaccacatgacttaaagaaggcgtggaaggttggtgttctcactgcagtcatcaagcatatgtcccctgagtatcgccaaaattcgcaagcgttctaggcagntcaaactccttcaagacaaaattacagcaaaggaaagctcaaccgtgccttccagcagcaaccaagaggaagccattgcgtgagag

SEQ ID NO: 90699 - DNA, 276 bp, Glycine max
  Clone ID: 700904202H1
gagtaagggtgtaaaaatatttgtttcattttattttattgaaggagtagaatttgggaactaggttttgttaagtttgggcttgatcaccccatagggaagttttggagaatttgtgggtgtcaggggaaaatgcagcaagatcacaggaaaaagagttcagctgagatggactttttctccgaatatggtgatgccaaccggtacaaaattcaagaagtcattgggaagggaagttatggtgttgtctgttcagccattgacactcacacaggt

SEQ ID NO: 90700 - DNA, 276 bp, Glycine max
  Clone ID: 700904203H1
gaaaaatattaagagagaaaataatcaatactacaactttgcaattttcgtggtagctagaccaaggtagttcaattgccatggatattggtggtggagtggaagagccagtgagagagttgaggcaatacttcaaaactggaaaaaccaagagtgtaacatggaggaaaaaccagctcacatctctcatagaccttgttcatgagaatgaagatgctatatttaaggccctccataaagatcttgggaagcacctgttgaggcttaccgtgatga

SEQ ID NO: 90701 - DNA, 272 bp, Glycine max
  Clone ID: 700904204H1
tctctctagagttcttatttcctctctctagaattttctatccgttcatccccctcacaaattagggtttttgcgaatcttttattgtctgaaatcgaatccaacgtttcagccatggtttccgattcaatcgccgccgtgccgattccctccgccgcaaacaccaggaacccggggaagaagaagaggaccaacaggtccgcgaaattgaagcagtacaaaatcgatgcgcgccgcgagcaatggttatctcaaggtgcggtgaagagcaa

SEQ ID NO: 90702 - DNA, 138 bp, Glycine max
  Clone ID: 700904205H1
ctttctcctattcgtacttcttctttctcttcatcagctattgttgcattagactgagttactgctacttacagggacctcttcaactaacctctacaagaacttctgttccaagacatagtcccaacgtattcaaca

SEQ ID NO: 90703 - DNA, 271 bp, Glycine max
  Clone ID: 700904207H1
gtaattataattataatatactacccagcaaaacaccaacgttgttttgagttattgaattaatattaaacctagctatcatccatgggaagctgcatatcaacgcaaggcgtgagaacacgcaagaggtcgaggagcaagaattacaagccctccacgccaagagggcacgagccggcgcgaaggtcgagcgtgacggcgcgtccgctgaacgtggtgtcggggccgagtcctgggaacatattcgacaagtaccagttcgggaaggagc

SEQ ID NO: 90704 - DNA, 251 bp, Glycine max
  Clone ID: 700904210H1
agcgaatccagccacagcacagcactctttgcaacacaacaaaaaaagacaacacagagagaagcgtcttaataaacgctcttctctgaaaaacctgatttcttctcttcttctcttctctttcgtttcgatcttcgatctctgaaaatgagagagtgcatttcaatccacatcggtcaggccggtattcaggtcggaaacgcctgctgggagctctactgcctcgaacacgagcatcagcctgatgggca

SEQ ID NO: 90705 - DNA, 265 bp, Glycine max
  Clone ID: 700904211H1
atggctcgtcactccttgctcttagccctcctcctcttcgccgccgtggccaccgccgcgatggcgtggcgcgtccgacgccgacgacatcctgatccgtcagtggtgccagatgttggcaacgaagaggaggacaacctgctgaacgccgatcaccacttcgagtgcttcaaggccaagttcgccaagacctacgccaccaaggaggagcacgatcatcgcttcggcgtcttcaagtccaacctccgcagagccaggctgcacg

SEQ ID NO: 90706 - DNA, 273 bp, Glycine max
  Clone ID: 700904212H1
tagaaacagcaactatgtctctcatgcagcttactagctcccctgttggctcactggtccgtttcattgtaatatttgctttatggtacagaaccatggctttggccaagttgccaccaaacgcttcatcagttccagcagttttagcgtttggtgattccatcgtggacccaggcaacaacaacaacataaaaacattgatcaagtgcaacttcccaccttatggaaaggattttcagggaggaaacccaacgggtcgattttgcaatggaa

SEQ ID NO: 90707 - DNA, 279 bp, Glycine max
  Clone ID: 700904215H1
gtggaaactcgtgcgatatgccgccgcctccaacctcgcccgatcgcggcggttctccgccgcgattcctggtccgtgcattgttcacaagcgcggtgccgacatactccatgacccctggttcaacacggatacagggtttcctttgactgaacagggatcaggttggggcttcggggcctcttacctcctcgtgttatatcctttgagcagcaatatgatcgctttatgaattcattccgatctttggagaataatactcaggggcaaccagataaa

SEQ ID NO: 90708 - DNA, 272 bp, Glycine max
  unsure (1)..(272): unsure at all n locations
  Clone ID: 700904216H1
tagccccttaccagccctcaaggaaatcttccgcactgatggtgaatgggttcttcaatttccaccacctcatgtagctgaagttagtaagtctgggtggatgactgatgaggaatttgctagagaggtgattgccggtgtaaacccaaatgtgatccgacgtcttcaagaattcccaccaaagagcacacttgatcccacactctatggtgatcanaccagtaccataacacaagaacaattggagattaacatgggaggggtcacagtag

SEQ ID NO: 90709 - DNA, 268 bp, Glycine max
  Clone ID: 700904218H1
ggaacataaacgaattgaaacatcaaatggctaaagatatggaggcaaacagtaagcagacttctgttgacaatcaacaagcaatacaggaacagccagttgagctgattgatagtggtggagcacatcaagctgaaccaggaaattccattaattggaattatcctaaagaagcttcggttgactatcaacaaacaatgcaggagcaatcagttgagctgtttgatggtggtggagctgttcaaagtgaaccacaaaactccataaa

SEQ ID NO: 90710 - DNA, 270 bp, Glycine max
  Clone ID: 700904220H1
attctagtggctgatattgcttctgcttcctttgttgtagttgaagtcgctcccctcattcttctttcgttgctacttctactgtttcttcctccgatccctcattgccgcaaatgactcctcctgctagtgttaggtgaattccctcgcttcacatgcatgatcgcaccttcaactctcttcttcttcttcttctccatggctttttttcaaggttttggcgccgtggagttcgttttggtgaggattctgattaaagagttttctttt

SEQ ID NO: 90711 - DNA, 270 bp, Glycine max
  Clone ID: 700904221H1
tcgaaaaccaaatccctaattttctctctcttcaatggcgccgcagaaactcaacgattacgaacggaagcgactcgagaacattcgccgcaacgatgaaatgatggctgccctcaaactccactccaaagccacccaactctccaacttcaagcgtagtcaaagggttggaaccaaatcctacaacatgaaatcggaaaagaaacccaaaaccgaaaccccaattgtgattaggcgctccctccgaacaagaggtattccgccagattc

SEQ ID NO: 90712 - DNA, 270 bp, Glycine max
  Clone ID: 700904222H1
gaaaagaagttaagtgataaggctaagtccaaagaacaagtaatgctcgatgatcattcccttcaagacatagagaaagttgcatccaaagagaacaatgagactgagaatgtggaaatgaatgattgcaatacaagtatatgcaagtctacctctgatactagtagtagtagcagtaacaagagtgtgccaaaagatggaaggaagaagcgacacgttgcttcagcatccacagcattactttttggcacaatccttggtctccttcaa

SEQ ID NO: 90713 - DNA, 269 bp, Glycine max
  Clone ID: 700904224H1
accgagtaagatttttcttgttcctttgttggtgggtttcctttccgcttcaggttcagcttcaacttcaaattctcagtgaaaccaattcagctgagtccaaatcccaaatccgaatcaaaatccgaagtgagatttgcgatggagaggcttcagcgaatgtttgcaggtgcaggtggagcgctagggcaccctcccccagattccccaactctcgattcctccgagcaggtctacatctcctcactcgctctcctcaagatgcttaa

SEQ ID NO: 90714 - DNA, 265 bp, Glycine max
  Clone ID: 700904226H1
cgtcaaactgttgctgtgggagtcatcaagaacgttgagaagaaggatcctaccggagccaaggtcaccaaggctgcccagaagaagaagtgaatcgtgcgggctggttcatcaggggatgttggttacaataaatgttggtttcttttctgtactcttgtgtcttcttttctaggtagcttgtttttcggacaaagtttgaagtctccaccatcatctcgcaactgttgtcccagaactggggttcttgatcgacggtgcaaaa

SEQ ID NO: 90715 - DNA, 269 bp, Glycine max
  Clone ID: 700904228H1
ctagggttatcatttctccatttccattttctctctcacttttcaagaatcgtaagctatgggaaagtcttacccaactgtgagtgctgattaccagaaggccgttgagaaggcgaagaagaagctcagaggcttcatcgctgagaagagatgcgctcctctaatgctccgtttggcatggcactctgctggaacctttgacaagggcacgaagaccggtggacccttcggaaccatcaagcaccctgccgaactggctcacagcgcta

SEQ ID NO: 90716 - DNA, 270 bp, Glycine max
  Clone ID: 700904229H1
gttttgtctctctcggaatacagggcgcaactctatgattatctgaagagtagaatgatcaccattgcacccaatttgactgcaatggttggggagcttgttggtgctcgcctcattgcccatggtggtagcttattaaatcttgcaaagcagcctggtagtactgtgcaaattcttggtgctgagaaggctctctttagggcactgaagactaagcatgctactcccaagtatggtcttatataccatgcttccttgattggtcaggca

SEQ ID NO: 90717 - DNA, 273 bp, Glycine max
  Clone ID: 700904231H1
caaggccaggtatgatgaaattgtgaaggaagtctcttcctacttgaagaaagtaggatacaaccctgacaagattccttttgttcctatctctggttttgagggagacaacatgattgagaggtccacaaaccttgactggtacaagggtccaactctgcttgatgcacttgaccagattagtgagcccaagaggccctctgacaagcccctcaggcttccccttcaggatgtgtacaagattggaggtattggaactgtgccagtgggacg

SEQ ID NO: 90718 - DNA, 269 bp, Glycine max
  Clone ID: 700904232H1
cgctcgagcaggacagctttatatggttatgaacctcctcttaaacccaagcataaaaagcctgggttgttatcatcactctgtggtggaactcggaagaagagttcaaaatctagtaagaaaggatcagacaagaaaaaatctagcaagcatgttgacccaactgtgcccattttcaatttagaggatatagaagaaggagtagaaggtactggatttgatgatgagaaatcactacttatgtcacaaatgagtcttgagaaaaggtt

SEQ ID NO: 90719 - DNA, 275 bp, Glycine max
  Clone ID: 700904233H1
gtcaaggcatgcttctgatgaggtctaccttggacagagggacaatccaaattggactgatgacacaaaggcaattcaagcctttaagaagtttggaaacaagctgaaggaaattgaggacaaaatctcagggaggaacaagaattcaagccttaggaaccgtaatggaccggcgcagatgccctacactgtgcttcttcctaccagtggagaaggccttactttcagaggaattcccaacagcatctctatctaatgagagtgtgtggtgtgtg

SEQ ID NO: 90720 - DNA, 269 bp, Glycine max
  Clone ID: 700904235H1
ctttgttatcaaagacttaaatcaacacgttggacgagtttttagctgtctgtagctgtcggaagtttgaaacatacatattcttcttaattttgggtcagtagtatgtggaagttgaagatagcagaaggaggagatgggttaatctctgtgaacaatttcattggacgtcaacactgggagtttgatcctaatgctggaactccacaagaacgtgctcaagttgaaagggtacgagaggaatacaaaaagaaccggttttgcattaa

SEQ ID NO: 90721 - DNA, 270 bp, Glycine max
  Clone ID: 700904237H1
ttctagatcgcgagcggccgacctttttcattttttaattttgtttatatatatatatgggtgtgttcaatttttgcgatccctccctagttgaatgaagctgcgatgggaaactcgcatgctaaaaagcgtgacactcaattttccagaaacgttgttaaagggagagttccctctccaaaagacaaaaccttatcatcattacagtcaccatcatcaccatcacaatcaccatcaccgtcgctagaaccaccgcgagaaccaccacca

SEQ ID NO: 90722 - DNA, 265 bp, Glycine max
  Clone ID: 700904239H1
aaagaagttctaaggaagagggaatatgcagaatacaaggtgctagttgtctatttgcaataacaacatcagcgatccaaccttagtattcttcaacccagagagatttgtaataataaattacaacaacttaaacgatggcaggaggagcttatgtagattcgggaaatgcaaagcaatttgatgggaaggtcacggcattcgtattggttacatgctttgtggcagccatgggaggcttactcttcggttatgatcttggaat

SEQ ID NO: 90723 - DNA, 267 bp, Glycine max
  Clone ID: 700904241H1
ctcactaggagctcctctccactggttcttcatctgcatgcacacagttgcatagttttggaaaccaagaattcctgaagaagggtagcatcaacaagcagttctgaaaatggagatcaccaatgtcagtgagtatgaggctattgcaaagcagaagttgccaaagatggcgtttgactactacgcatctggtgcagaggaccagtggactctgcaagagaacagaaatgccttttccagaattttgttcggccacgtattcttatt

SEQ ID NO: 90724 - DNA, 261 bp, Glycine max
  Clone ID: 700904242H1
gcagttgaaagaactattcaatgtcaatcattttatagttagtcaggccaaccctcatattgcaccactattgagattgaaagaatttgtgcggacttatgggggcaactttgctgccaagcttgctcatcttgtggagatggaggtgaaacataggtgtcatcaaatactggaacttggttttccattaggtggacttgctaaattgtttgctcaagactgggaaggtgatgtgactgtcgttatcccgcaactcttgct

SEQ ID NO: 90725 - DNA, 267 bp, Glycine max
  Clone ID: 700904243H1
gaacacttcagaccagtcccacatacaaccatcccaagctgaagttctggttttaaatcttcaaactaagaagtactcctttccagagtacatggagaaaatgagcgaactaaaagttcttatcatgacaaattatggttttcatccctgtgaacttgaaaattgcaaactacccagctctgtatcaaacctgaaaagaatcagactagagcggatttctgttccccacgtaggggcattgaaaaatcttgaaaagttatccctcta

SEQ ID NO: 90726 - DNA, 268 bp, Glycine max
  Clone ID: 700904244H1
atcaaacaataataaccggtttttctcacttttctttttcttttgggctttcagtttcacataacaaaccgtttctcagaacatcccataaaagcttagcttgtattcagtttctcttctcccaacgtttttgtcgctagtaacagaatattacaaagtaacggctttctcagtggagcgcttgatttgggttggtgggtcaacttcaagtttcaatttttttttcatttttgtctggtcgattgagaaggctcagttgcagagacgg

SEQ ID NO: 90727 - DNA, 267 bp, Glycine max
  unsure (1)..(267): unsure at all n locations
  Clone ID: 700904245H1
gcagaaagcaagctcatcctagagttttaaaaatggcagcagcctcctccatggctctctcttccccatccttggctggcaaggccgtgaagctgggcccatcagcccccgaagtcgggagggtcagcatgaggaagaccgtcaccaagcaggcctcctccggaagcccatggtacggcccagaccgcgtcaagtacttgggcccattctctggcgagcccccgtcctacctcactggcgagtatccaggntgactacggctggaca

SEQ ID NO: 90728 - DNA, 217 bp, Glycine max
  Clone ID: 700904246H1
gtgccctgcacgtgctcgactacgccaccactacatccgacgacgacacggaaaaggaggaggaggagctggtacacgagcaaaacgaatcctccggcggagggcggtggtagtggcggcgtgcggtggcggcacgcggcggacgggggagcgcgttaggcgatcttgaccaaggcgaatgggtcagaatgaacagtgtctctatgtcgcgcgggtg

SEQ ID NO: 90729 - DNA, 271 bp, Glycine max
  Clone ID: 700904247H1
attgaggagaaagaagaagaaggatgtggcacgaggcgaggaggtcggagaagaaggtccacgacatgatggacgcggctcggaagagagcgcaacgacgcgccgtttacctagccaagaggcgcggcgatcctcagcaatctattcagctcgtcggctttcgaagccgaacctatcgcgacgacgctctctaccaagccacgcaggatcagcagggcctgataccttggaatgggaaacaagatgtattgattgacagatttgatgggcg

SEQ ID NO: 90730 - DNA, 270 bp, Glycine max
  Clone ID: 700904248H1
gctagccttcagaggacacaatgttttgcccgaaatacaggggacgctgccttcaaatttcgaacaaacatccaaaagaccaatgcgaagaggagttagcatatcatatgtactcatttccatgtgcatgtttcccctcgcaattgccggattttgggcctatggaaaccagataaatgacgggggattgttaacttcgttcccacaattccacaagaggcaaatcacaaaattctctatgggtgcaatatatgttctagtaataataca

SEQ ID NO: 90731 - DNA, 273 bp, Glycine max
  Clone ID: 700904249H1
gtcacggagcaaagcaaggctctcttcttctccgtcactgccactctcattgtctcttcttctctcttctctagggtttatcgccatttgatctcaagctctcttcccaaaatgccgtctccccctcttccacaatcggaccgctactgcccctgcttttgccggtgtgcaatgtatgttttcttgctgcggttctggaaatgttgaattctgaactgagataaaatgagtaggatagaactatcgagggcgaagtcagcgccggttccattg

SEQ ID NO: 90732 - DNA, 267 bp, Glycine max
  Clone ID: 700904250H1
ctccacttgttagtagcactgatccaggtaatccagaagctgtagcagaccttagtcatcaatcagtttctgatatttagagccctgattcgattcttttttgaaaagacattctaactttttgtcttcagagtggactggtggttatgttaacctttccgcttttgtttaagtttggcttggctttaaatagtgattaccttgtggcaagaggttcattcaggggtattggtgtaagaaatttgagtgaacattctaatatgatat

SEQ ID NO: 90733 - DNA, 267 bp, Glycine max
  Clone ID: 700904251H1
ttaagaatcaaagtagattggtgagaataattggagagttgctagttcatccatgtgatcaacctcgcacggccatgttgatgttaccaatgcaatgtgcttcgctgttcatctctcccatcacgattgacaaaccctaaccctaaccctaatcacccgaccagcatggtgaagactaaggtccccgattggctcaacagctctatatggtcctcatcatcgccgtcgtcccctcgctcctccggcgtcgccagctccttcgaacag

SEQ ID NO: 90734 - DNA, 246 bp, Glycine max
  Clone ID: 700904255H1
taaagttcagttttttgcatcgtttttattaaaatttgttggcgaacaaaacagagaaaaaaaaaccaaaaaattgaaatttcttatccgttttggcgaattgaactgcgtgttcaattgggttgttgaattcgaggcagagggaaccgcgggtgtacaaggaatttcgattctgctgttgttagaaacggtgtagtttggtgtgagagaagctggggacttggggtggtcgtaacgacgtcgttg

SEQ ID NO: 90735 - DNA, 264 bp, Glycine max
  Clone ID: 700904256H1
ggggtacgtccttggcctaagggtatcacctcagcacaggagaaaagggattggctcaagccttgtgagaacactagaagaatggttcacttcaaaagatgtggactatgcatacatggcaacagagaaagacaaccatgcctcagtgagtctcttcatggacaagtttggctacaccaagttcaggactccagctattcttgtcaaccctgtgaaccatcattgctttcaaatatcacccaacattgagatagcaaggttgaa

SEQ ID NO: 90736 - DNA, 258 bp, Glycine max
  Clone ID: 700904257H1
ctgagaattaagtgtatcctccagaatcaaatgtggatcacttgcctggagaagaatcgagtcaatcaacagaccacaaaaatatcaatttgttgcaagagaaaggatttatggaatatggatgtcagcattaccggagaagatgccgtattagggccccctgttgcaatgagatttttgattgccgccattgtcacaatgaggcaaaaaatgatatcaacattgatctgaagcttagacatgatattccacacaaca

SEQ ID NO: 90737 - DNA, 264 bp, Glycine max
  Clone ID: 700904259H1
aaacttctctacaaaacaaaaccaacccccccctccttaaggccttaacttttgagtcaaaatttatcatttcaaagcactctccaatagagataagtttgattcatccatcccagttggttggttgtaacccggctctggcactgttaaaggtttcaatctctcattgttgccagcttttgtgtacatgccagtttatagcaacctttaccacttcttttaaaccaaaacaataagctttttcccttcattgttgtccagaaa

SEQ ID NO: 90738 - DNA, 261 bp, Glycine max
  Clone ID: 700904260H1
cggaaccaaacccgggtccgcgccggagatccccacggtggacctcgccgccgaggagagctcccgcgccgccgtggtggagcaggtccggcgggcggcgagcaccgtgggattcttccaggtggtcaaccacggcgtcccggaggagctgctattgcgaacgctggcggcggtgaaggcgttccacgagcagcccgcagaggagagggcgcgggtgtaccgtaggcagatggggaagggtgtgtcgtatatttccaacgt

SEQ ID NO: 90739 - DNA, 263 bp, Glycine max
  Clone ID: 700904261H1
cgagaataagaccaagtcccctgcttccggcgtgtggtccaccatcaagcctttcgtcaatggcggagctccggcatgctcgccacctgcgttattcaacccatcgatatgatcaaggtgaggattcaacttgggcaaggatcagctgcgcaggtcacttccaccatgcttaagaatgagggtgttgctgccttctataagggtctatctgctggattactcaggcaggctacatacaccactgcccgtcttggatcatttaa

SEQ ID NO: 90740 - DNA, 265 bp, Glycine max
  Clone ID: 700904263H1
ctcataacacaaagcacaaagcaaagctcatccttgagttaaaaaatggcagcagcttcttccatggctctctcatccccatccttggctggcaaggccgtgaagctgggcccatcagccccagaagtgggaagggtgagcatgaggaagaccgtcaccaagcaggtctcctcaggaagcccatggtacggcccagaccgagtcaagtacttgggcccattctctggcgagcccccgtcctacctaaccggtgagttccaggcga

SEQ ID NO: 90741 - DNA, 270 bp, Glycine max
  Clone ID: 700904265H1
atttgatccagattttatcaacattaggacaaaggctcgtgaagttctgcaaagggaagatgacctgaatgaaattgttcagcttgtgggcaaggatgctttagctgaaggagataagatcaccttagaaactgcaaagcttttgagagaggattatcttgctcaaaatgcctttacaccatatgacaaattctgccccttctacaagtctgtttggatgatgcgcaacattatccatttctacaatttggcaaatcaggcagtagagag

SEQ ID NO: 90742 - DNA, 267 bp, Glycine max
  Clone ID: 700904266H1
atttgagaaaatatatctgttacaagttgtatcaaggagaagcatagacatgaagaagcgaggatcaggcaggcgtttcctgatgtgggttatggtgatttggctccacgcacatctcagcattgcagctgaactgtccaagtccaatgacacggacactgcttctgagagttctgtgtgcgatggctccgtagaagactgcctcaacaacgtccaccgcttggactcagagcttcttcccaccatctccagctcccacttccgcag

SEQ ID NO: 90743 - DNA, 266 bp, Glycine max
  Clone ID: 700904267H1
gccgtgcctacgtcaccttcctcgccggaaacggtgactatgtgaaaggtgtcgttggcttggccaaaggtctgaggaaggtgaaaagcatgtaccctctggtggttgcagtgttacccgatgttccagaacatcaccgaaacattctcacctcccaaggtggcattgttagagaaattgaacccgtgtaccctcctgagaatcagacgcagttcgccatggcatattacgtcatcaactattccaagctacgtatttgggagttt

SEQ ID NO: 90744 - DNA, 107 bp, Glycine max
  Clone ID: 700904268H1
cattcttatttttatcctctcttcacttgcacgctctgtctctctgtcagccatcatcatgggagcagtgattctcccagatctcggcaccgagattttgattccgg

SEQ ID NO: 90745 - DNA, 263 bp, Glycine max
  Clone ID: 700904270H1
ctttcttcctttgtaatagaaagcacgcgtttctctctctccctctctcaacgaatatttgtgtacttcctcttttgtgggtagattcaatttaccatgtcgagttcatcggaatactctcaattttccggccagaaaccggcgaggtcgccggagaaatcgagcttctctcagacttgtagcctgttgagtcaatacatcaaggagaagggtagcttcggagatcttaccctcggaatgacatcatgtgggtcacctgagac

SEQ ID NO: 90746 - DNA, 265 bp, Glycine max
  Clone ID: 700904271H1
ggcctgcaaccctcgaaacgtgaatagccgtggcggccacctatttctctgtttaacgtcttcactcattctacattttcgcctcaaactacttcttccaccgatcactgttcagcagagaagtgttgccttggactcttgaggtgcaatgagattggagaagtgttggttctgttcttctaccatataccctggacatggaatccagtttgttcgtaatgatgcaaagatttttcggttttgtagatctaaatgccacaaaaac

SEQ ID NO: 90747 - DNA, 261 bp, Glycine max
  Clone ID: 700904272H1
taagatttgagtttgggcatgtgtgagctgtggctttgcagggaagaagagtgtcagtagaaaataaatgtcctcttcccagggacactctctatttcacagatctatatctaagtgtcggtgatcccctttctccttccttctctgagagacaatgacaatgacgtgggcgcgattcgattcgtggaagcagcaatactacaccacaagcggcgtggtggtaggttacgcagtatgctccagcctcctggccatcatcaa

SEQ ID NO: 90748 - DNA, 258 bp, Glycine max
  unsure (1)..(258): unsure at all n locations
  Clone ID: 700904274H1
caacaacactctctcttctcgctcttggcttttcgctcttcactcactctcattcattcatttccaccgttcatggatccagtaagcgtgtggggtaacacgcccttggcgacggtggatcccgagatccatgacctcatcgagaaggagaagcgccgtcaatgccgcggaatcgagctcatcgcctccgagaacattcacctcctcgccgntcatgaggcccacggcagcgcatatacgaacaaactcgtcgagggc

SEQ ID NO: 90749 - DNA, 262 bp, Glycine max
  Clone ID: 700904275H1
tgaacattcccattacctaccatataccatcaaccaatatcttctttgtcgcttttattatctgtttttccggcgatggattccggcgcgtggctcctgttcctggtggtcgtggctgtctcaacgtccggccacattcactctgaagcgatcctgagactcccgtccgagagcgaggagatctcgcgcgactactgcgacagctggatgctggcggtggagacgaacaacgccgggacgtggaaccgcgtgccggcgagtt

SEQ ID NO: 90750 - DNA, 253 bp, Glycine max
  Clone ID: 700904276H1
cttaaaaatgctcctattttgttgttggatgaagctagttcatcacttgaatctgagtcaagccgagtggtgcaagaggctctagacaccctaataatgggaaacaaaaccacgattttaatagcacacagggctgcgatgatgaggcatgtggataacatagtagttctaaacggaggaaggatagtggaggaggggacccaggattcattagtggcaaaaaatggtctgtatgtccgattgatgcaacctc

SEQ ID NO: 90751 - DNA, 259 bp, Glycine max
  Clone ID: 700904277H1
ctcttggcatcttgtgttgtgtccctcttttaagctatttccttctcttaacacaattggttgtgccaattgccatagtcaccaaccaattaacaaaggtatatatatcatcatatcatcaccaaatgaaaaatattgggttgttttttcttgtggtggtggctacttttgtggtggcagccacagctggtagcttttaccaagactttgaaataacgtggggtggtgagcgtgccaaaatctatgagaatggaaacct

SEQ ID NO: 90752 - DNA, 266 bp, Glycine max
  Clone ID: 700904278H1
tggattttcagcggcgagggcattggatgtgctgaatttcactccactcaacaacagacctattaggatcatgtattctcatcgggatcctagtcttaggaagagtggtactgcgaatatttttatcaagaatttggataaggctattgaccacaaggccttacatgatactttttcttcttttggactcattctttcttgcaaaatagcaactgatgcttctggcctgtctaagggctatggttttgttcaattcgacagtgaag

SEQ ID NO: 90753 - DNA, 259 bp, Glycine max
  Clone ID: 700904280H1
aaaaagaaagaaaaagcaataccattaccaatagcatccccaggttttctggaccactttgctgctgaatatagatgtcggctactatactgtgaatcaaacttcagtgtgatcgataatggctttccaaagggaaactacaaccatgattggagtttggcttgtggtgttgatggttctctccaaagggttatcttcaacaggggttgtaccagataatttcactataccttcttttgtaaatattggggttctctat

SEQ ID NO: 90754 - DNA, 264 bp, Glycine max
  Clone ID: 700904281H1
tacagaagctgggattatctgaacattcttctactattcttgttggatgcattttttcagaaggacgagaccttgacagaaaaagggtgaaggaagttatcttgaatgctaagcagtatgatgtccagtttatatttatggggaccagtgaaagattgatcatgaatcaggcgcctgaatcacttcagacggaattcaaggatgataatcttaaatttgtgcctacttatgatgaagctctgttgcatttagtctttgctggat

SEQ ID NO: 90755 - DNA, 263 bp, Glycine max
  Clone ID: 700904282H1
accagattaaaaatgatcttggcatgtccaactatcccatggtcccaggacatgaagtggttggtgaggtactggaggtgggatcaaacgttagcaggttcagagtgggagagttggtgggagttggactcctcgtaggttgctgcaaaaactgccagccatgccaacaagacattgagaattactgcagcaagaagatctggtcttacaatgatgtgtatgtcgatggaaaacccacacagggtggctttgctgaaaccatg

SEQ ID NO: 90756 - DNA, 259 bp, Glycine max
  Clone ID: 700904283H1
catatactcataaatcacatagctagttgtttaaagtaagagagaagaaagaagcaaatggcaaactttccagttgttgacatggggaagcttaacaccgaagagagacctgcagccatggagattataaaagatgcctgtgagaactggggtttctttgagttggtgaaccatgggatatccattgagcttatggacacagtggagaagctcacaaaagagcattacaagaagactatggagcaaaggttcaaagaaa

SEQ ID NO: 90757 - DNA, 261 bp, Glycine max
  Clone ID: 700904284H1
ctcatctttcaatttcaatcaacggttatacccttttctatttgagcatcatcatgtccaccgcagcgcacccaaggccaagaaaacggcgtcgtccaagaagcccctctcccatcctaccttcgccgcggtacttcctaattactctctttcgattcaatttcgaaatcaattgtgtttaattagtttcattgttttgtagatgatagcggaggcgatagccagtctgaaggagagaaccggttcgagccaatacgcgat

SEQ ID NO: 90758 - DNA, 206 bp, Glycine max
  Clone ID: 700904285H1
caaaggtggagtgaacgtaaacacaggaccaaagaagggtaagccagtgcacgttggagtgggcccacattctccatttgattacaattacgcagccagcgaaacccagtggcacgatgaccccaacgtggcactcttcttcttggaaaaggacttgcactacggaacaaagttgaaccttcactgtcactcgctacttcacctaa

SEQ ID NO: 90759 - DNA, 259 bp, Glycine max
  Clone ID: 700904286H1
attttccagaggatgaagaactatactatctatgctgtgtcaatcaccattcgtattgtgtttggtttcttgtttattgcgttgatctggaagtttgattttgcacccttcatggttttgattattgccatactcaatgatggtaccattatgactatatccaaggatagagtgaaaccatcaccacttcctgatagctggaaactgagggagatatttgctactggcgttgtgctaggaagttacatggcactaatga

SEQ ID NO: 90760 - DNA, 113 bp, Glycine max
  Clone ID: 700904288H1
aatggggtctctaatggcctatgctacacttactcttttattggcaataatagtctctctaagcttgccatctcaaacctcagctgatgacaagtacgactattcatctcctc

SEQ ID NO: 90761 - DNA, 202 bp, Glycine max
  Clone ID: 700904290H1
aacgctgactctcgggtttgtactactctttacccaacgctctttcctctgtatcgaacacttatcctttaacactttctctctcttgttggattcgctgttctttcgcggagatctgtgtgcttttcgactctgttcctcttctgggtctcgttactctttcagattggtgctaaatttggcagagataagccacgtgtat

SEQ ID NO: 90762 - DNA, 69 bp, Glycine max
  Clone ID: 700904291H1
cctggtcactactcacaaatgtgaattgtccccagtctctcgagaacttagaatagaatactcgtccca

SEQ ID NO: 90763 - DNA, 260 bp, Glycine max
  Clone ID: 700904292H1
gttgaaacatgatcagctcaagatggagctcacagagggacatgtattccaaggttggcatgaaggagctatagagtttccacctacatacaaataccgtctgacttctgtagactacctaggctgtgatcagcagcatgtgagcagaaagcggcgctccccagcatggtgcgatagaataatatggtttgggaagggaatgaagcaaatccaatacaacaggagcgagtcaaaactttctgatcataggcctgtacgag

SEQ ID NO: 90764 - DNA, 259 bp, Glycine max
  Clone ID: 700904293H1
ccgcggcttcaaccttgtagttattctctttcttcttttttagctatccctctcttgaaaaatctagatctcgttcttccttgatctacgttacgcttttagtgaccggatctgtatggatctgaaccagatctacacgccgatggtggttttggcctggtctttcatagatctgatgcatggaggctcagatctactgtacagaggtgtacgattcatatactgtagataatcgatgagaagaatgcagatccagccg

SEQ ID NO: 90765 - DNA, 261 bp, Glycine max
  Clone ID: 700904294H1
ggcgtcttcataaacgcctttcttctccgtttccgtttcctcgttcgaattcgctttttgatctgcgaaaatgagagagtgcatctcgatccacattggtcaggctgctatccaggtcggaaatgcttgctgggagctctactgcctcgagcacggcatcgggcccgatgggcaaatgccaagtgacaagacagttggcggtggtgatgatgcttgcaatactttctgcagcgagactggtgctggaaagcacgtgccacg

SEQ ID NO: 90766 - DNA, 260 bp, Glycine max
  unsure (1)..(260): unsure at all n locations
  Clone ID: 700904295H1
aattaagatatncggttgtcttgcatcaagcttttgagccggatctttgccaagatcgtgttgcggattgtcatgantgctgcgtatgctactgataaggcgactatcttatacatgctcgaggttgtagacattgatgtgatcagtcgtcttaatgaattcactgcgatgagtagantagatcccagaatctatggtgctcaaatgagtaccataagactagaacaattggagattaacatgggaggggtcacagtaga

SEQ ID NO: 90767 - DNA, 136 bp, Glycine max
  Clone ID: 700904301H1
gcaaagcacaagatgttgttgaatactctgttactattatgggtcaaggccaagttagaccagtccattctggaggttctccaaccagactagtcctctccaacttggtttctttttatacaaccttcccactctc

SEQ ID NO: 90768 - DNA, 263 bp, Glycine max
  Clone ID: 700904302H1
ccttcagtcccaaacaccctccttacgatgagatgatatacacagcaatcggagctctgaaggagagggatggttcgagcaagcgagccataggaaagtacatagaacaagtctacaaggaccttccacccactcaccctgccttgttgactcaccatctcaaccgattgaaatcctctgccctcctcgtcctcgtcaagaaatcctacaagcttcctggatctcatcatctgcctgcgctccagccccaaaagacccgtggt

SEQ ID NO: 90769 - DNA, 257 bp, Glycine max
  Clone ID: 700904303H1
attttgtgtcgtcagcttctattttacgggcagaaacatttggtatcccaatccctgactgggtgacagatgagaaggccaccagtctctctacagcttctatagatgatgcagcggttattaatgatctagtaatcaagttagagaggtgccgggcaaatcttccaccagtgttcatgatgaaaccaattcaatttgagaaggatgatgacacaaactaccatatggatgtgattgctgggcttgccaacatgagg

SEQ ID NO: 90770 - DNA, 256 bp, Glycine max
  Clone ID: 700904305H1
gttttgtttatttgaaattaacaagtagcaaagatgtttggaatcatcggaggaaacaagggtcacaagataaaggggaacttggtgattatgcgaaagaatgtgttggatatcaacagcattaccagtgttaagggtgtcatcggaaccggcattaacatcattggacgagtcgtcgacaccgttactgctttggcgtcccacatctccatccagctcattagtgccaccaaggctgatggacatgggaaaggaa

SEQ ID NO: 90771 - DNA, 256 bp, Glycine max
  Clone ID: 700904306H1
gccgaagacgtgcacccggagagttggagagtgttcaactctttcgggaagcgttacattgtcacggctagtcctagggtgatggtggagccgtttgttaaggcgtttctcggggctgacaaggtgcttgggactgaacttgaggccaccaaatcggggacgttcactgggtttgttaagaagcctggtgtgcttgttggggagcataagaaagtggctctggtgaaggagtttcagggtaatttacctgacttgg

SEQ ID NO: 90772 - DNA, 250 bp, Glycine max
  Clone ID: 700904308H1
tttttcctgaactttctttttgctgcaatgcttacatggtcattgcctcttcgtataccagcatactcaatgctgggattgtctttactctattacattttagcgttaattgttgcaatgtctggatatagtgttgcatggggtggttcagctaaaatgtcaggcctattgtttgtgtttggagaggccacaagcttaatgctacttcttagcatcataatcatagttgtgctctatgctgcatggtgct

SEQ ID NO: 90773 - DNA, 257 bp, Glycine max
  Clone ID: 700904309H1
ggtgatttgttcactttgtgggactgaacaagaggtgagtttataatttcttcaatgtctttctgtgtggtttgtatagtggtatacgaattataaaggaggatcttgatctttaagcttttgaaggaaaatctttaatattgtcaaataaaaaagagaatcacactgcatgtgaatgcatgtgtgcattcacaggcataaaggagaaaaattggtgcatttgataagggaaatataaagtttattacttctgaagg

SEQ ID NO: 90774 - DNA, 261 bp, Glycine max
  Clone ID: 700904310H1
aaacgaagtgctcaatttgagcagactcttttggtgacagagactggtgttgaagttttaacagggaggttgcagacatcacccaatgtttttccttggttaaattcataattgggtgaatcatggagacagaagctggtagtgtctgaataccatacaattaatagacaacatttctttgatctacatctctggttttctcttttgggtatcatgtttgtaagttatacaaaaaaacagaagcaaaattcaattgagttt

SEQ ID NO: 90775 - DNA, 261 bp, Glycine max
  Clone ID: 700904311H1
ctttcacggaatcgtctctcctccttccttcggtttcaggaaccaacaagaacaagaacaaggttccagaagacaaatggtatttagcctacattgtgtattttaccctgggtctcggttaccttctcccatggaacgctttcatcaccgccgttgattacttctcctttctctaccctgacgccagcgttgaccgcatcttcgccgtggtttacatgatagtcgggctggtggggatctccctcataatcctctacagcc

SEQ ID NO: 90776 - DNA, 261 bp, Glycine max
  unsure (1)..(261): unsure at all n locations
  Clone ID: 700904312H1
tctcaccaccaccttccacttccactctcttccccatacatcncatttccatggcttcctccctcggcgacaacttcaaccttctctcgcctcaacagcaagagctggtgaagatgctattggataacggccaagagcacctgtttcgcgattggcctgctcccggcgttgacgacgaccacaaaaatgcgttcttcgaccagctgactcgactagattcgagttaccctggcggtctggaagcatacatcacaaatgcta

SEQ ID NO: 90777 - DNA, 259 bp, Glycine max
  Clone ID: 700904313H1
gtttgttctgtgaagaactgagggaggttcaggtccatgatattttgaaatctctctgtagtaggaagaccatgggacgagcttcatcattacttataatttttttggtatccggttcttcctttgccacctataatgtggtaacgatgataaggcactacggatcttcagaaggtgtggctgttaatgatggtgcattgttttttgaccctattactgagatgcctgatcatgtaaagaatcggaagacatctaaagt

SEQ ID NO: 90778 - DNA, 274 bp, Glycine max
  Clone ID: 700904314H1
ggtgcacgttggaatttctcaccttgcatctaccttcttctggctcatggtattcaagctcctatcagatatgcagaagaggtatatcctctgatttttcttcaattttggctctgtcgaatggacgcttgtgatgcttgaaattcaatagatatggacctggtgatgcaggattttgttagtgactgcatggtgattctgcattttatactctacgcttgctgatttgtttggtcacatgagttgttcactcagattgctgcatctgtgtaaa

SEQ ID NO: 90779 - DNA, 261 bp, Glycine max
  Clone ID: 700904315H1
aataatagttacactaacacacagtagtgaacaacaactccaacaacaacaatcaacaacaacaacaacgttgtagtgtgttgttttgttttttagtgcagtttatttttttggcatcaaagtggttgaatccatggattctgattatggtattcccagggaactctcagatcttcaaaagattcggtctttgtaccagccagagctccctccttgtctccagggaaccactgtgagggttgaatttggtgacgcaaccac

SEQ ID NO: 90780 - DNA, 263 bp, Glycine max
  Clone ID: 700904316H1
ggatggtcttgatgaattcaagcgatttgttgtttatgttcttgataaagtatgtgcaagtatgccacctgggcaagaaaagtttgtcggtatagcagaacttaagggatggggatactcaaacagtgacgtgcgtggatatcttagtgctctatccattttgcaggattactacccagagagattggggaagttgtttattgtgaacgcaccatacatctttatgaaagtgtggcaaattgtttacccattcattgacaaca

SEQ ID NO: 90781 - DNA, 270 bp, Glycine max
  unsure (1)..(270): unsure at all n locations
  Clone ID: 700904317H1
tacttcagctcgagattagatttcatctcccggggttttttgaactgtgcccatgtctaaagtcttcagctttaccggaaatgatgatttttatcatgggggtcctatttatcctaacccgaaggaaccgtgtctcttcttgtctcttggccgtcaagttgatgtttaccttcctcttcagaagaggtctcgcttcagtgttcccattgatatcagtggtgaatggtntgagcagaagcctaagacatctattgaatctttgccagatga

SEQ ID NO: 90782 - DNA, 255 bp, Glycine max
  Clone ID: 700904318H1
gacaattcaacttaagagatcaatatggccaccaccactacccagcctccctctaatatctgttttttccttctgttgttgcttctagcacactttcatttgggcataagccaacttgagctgaattactactctaaaagctgcccaaaagctgaagagatcatcaaggaacaagtcacacaactatataacaagcatggaaacactgccgtttcgtgggtcagaaatctcttccacgattgcgtggttaagtca

SEQ ID NO: 90783 - DNA, 257 bp, Glycine max
  Clone ID: 700904319H1
gcgccgccctcgccgcctccctccccgccatcatcgcctccgttgattaccgcctctgcccccaacagcgcctccacgccgcctaccacgacgccctcgaagccctccattgggcccaggcccaggcccaagcccaagcccaatcagacccgtggctccgcgactatgtagacttctcaaaaaccttcctcatgggaagcagcgccgggggaaacatcgccttcttcacagccctaaattctctctccctctcactc

SEQ ID NO: 90784 - DNA, 254 bp, Glycine max
  Clone ID: 700904322H1
ctcgggcaagataataatgttgagagggttgaagttgagaaggagcagggtggagaggagcagatgatggatgtgggttttgagcagtctaaggaggaggatatgcctggaatgtggcttttggatcagaagaactgtgtgggggagccatttttgcggccttgtcatggtggtgatgtgaagggtgtggagtttgaacaagtgagagaggacgatggagaagatgtgcaggaacaagaggaggtggaggagga

SEQ ID NO: 90785 - DNA, 257 bp, Glycine max
  Clone ID: 700904323H1
aaggaatcaaaccttaataaaaagtcccccaaaatggctccaacaagaaaccaccttcttcacattgccatgttcccatggtttgcaacaggtcacatgactccattcctccacctttcaaacgacgttagccaaaaggggtcacaaaatcacgttcttgctacctaaaaaagccaaactacaactccaacacctcaacaaccatcctcacctcatcacattccataccctcacaattcctcatgtaaaaggccttc

SEQ ID NO: 90786 - DNA, 108 bp, Glycine max
  Clone ID: 700904324H1
gcaaaaaccatcgatgatgtttctctgagtctgaggattcacgcgttactgttactgttactcaactcttattcccttccttgattccaattctccacacaacatacg

SEQ ID NO: 90787 - DNA, 257 bp, Glycine max
  Clone ID: 700904326H1
cttcaacacctgaaatggcatgaaattaaatacattcatgccatatcaggtgttgaagttgaagtggggattttgaatggtggcaatcgcagcacagcttcctctgtctcaattgagtcggatctcagtataggatcttgagtcatttgctccagcaactggtagagtctttgcagccacagcggcaaagggtgctggtggaagcaaagaagagaagggtcttcttgattggatccttggagggttgcagaaggaag

SEQ ID NO: 90788 - DNA, 255 bp, Glycine max
  Clone ID: 700904327H1
caggcctgcaatatcttggccctgacttggatgctatgaaagctgttgctgatgcacattctaagcggtcccttaatttgtttgaaattgctttgagggactacaaggcacagttggaggaagacccaattgtacacaggcacctttcatccttgtacgatacccttatggagcagaatctctgcaggttgatcgagcctttctcaagggttgagattgcacatattgctgaacttattgaacttcccacggatc

SEQ ID NO: 90789 - DNA, 256 bp, Glycine max
  Clone ID: 700904328H1
attttgaaagtgaaataatgcgtgacttacactaatattttcataaactgtgcacaaacttttgatgtagacttgaattcttttatgtcaaactcgtatgcaatttcatcattactattatgaaggaaaggttgcacaagtattataatttttgtgttattggttgagctagctaaatgaatctggattttattgtttcttcctaaacagattctctctttatgttcctttattagaaggcattcattttgttcag

SEQ ID NO: 90790 - DNA, 257 bp, Glycine max
  Clone ID: 700904329H1
cataaacatctataagttaataattcgggtgtgtaataaattaaaaaatacatatgcttgtgacaaaaaggagatgtcacaagaattatgtgaattcggatttctagtatgaaaatatttgtgtaaaattgaaataaagcgaattatactttgatttgttttataaattctttctgcatttgcttcattatcgtaaatgcagttagaatttataaaacaaataaagcgaattatactttgatttgttttataaattc

SEQ ID NO: 90791 - DNA, 199 bp, Glycine max
  Clone ID: 700904330H1
caacaagcaaagtacatggttgatttggaaatccaggtccccagcgcattcgacccgtttgccgaggcgagagaatcagatgcccccggggcaaaggagtatgtgcacatacgaattcagcagaggaatggaaagaagagtctgacaacagtgcaagggctgaagaaggagttcagctacgagaagatcctcaaggacc

SEQ ID NO: 90792 - DNA, 259 bp, Glycine max
  Clone ID: 700904331H1
caccgacaccggacacgacacgaagacgtaaacacctggccaaatatagaatgcagtatgaattagcgaactactgtgatcaagatataaatcacacctaccagtgatttgtttttgtcactagtctcttccatggaagttgaaactcactccctctcccccacctttgaattaatccaccttctctcccaatccaccaccgacacctacttccctcccaataatgccgccaaccaaccttctctcggccacgccaccg

SEQ ID NO: 90793 - DNA, 259 bp, Glycine max
  Clone ID: 700904332H1
gcagtgctgcagggactgtcactgaactcaaaaatgaactgtcttcggaatctttctcgattctctgttttgcccttcgaaacacctgttacgcgccaccgcaagaaccttcccctttccctgggtttcgtcaacaattctcgtcaatatccaactatggccctcaaggctgcctcaggttctataccaagtgcagacacaagtagtgccgataaggaggaagaaaagtctgagacatatagtcataacatgacagaag

SEQ ID NO: 90794 - DNA, 257 bp, Glycine max
  Clone ID: 700904333H1
gacaaaccctacctctctggtcagagtctccgccgttgcgctccttcccccgccgtctccgtttcatttcgacgccgaatatcatgcgtcgcctcttccgctgtcgctcagaaagttgggctgaaagattttcttcacttggatgattttgataaggatactattttgaagatgttggaccgggcccttgaggtcaaggcattgctgaagtcaggggacaggtcatttcggccttttgaggggaagacaatggcaat

SEQ ID NO: 90795 - DNA, 250 bp, Glycine max
  Clone ID: 700904335H1
caaaaccctgaagaaagacacagccattgtttgtttactttccattgattgagcgaaagctttgttttttctgcgatcattttccattgggtggaagaaagtctcaacctttagtcgaaagagcaaggatctgagtgagtgagcgatcatgtgtggtggtgcgattatctccgacttcattccagcgggtcccgccggcggggcgcacgcgtgaccgccgacatcctgtggccgaatttgaggaagcggt

SEQ ID NO: 90796 - DNA, 94 bp, Glycine max
  Clone ID: 700904336H1
ctttttaaatgtactttctctttcctttttgttatgccaaaggacattgctgcaccccaatacacactgcaaatcctgtaccttgtattacggt

SEQ ID NO: 90797 - DNA, 251 bp, Glycine max
  Clone ID: 700904338H1
aaaaaatgaaatgattttagctttcggagaagtccatttcatgtttttcttctcccagaaatgcttctagaaaagtttgtccaaacagcctaagaaattttcatccttagaattgtgagttgtttgaatgatcctaataggtgataagcattgtagctatgctatgttttcttgcctgtgtttcgtgatggaaatgaaaggaacccgactcagatttgttgctttcatgcaatagtgaaacagcactgttg

SEQ ID NO: 90798 - DNA, 247 bp, Glycine max
  Clone ID: 700904339H1
aacacaacacagcataccgtgtttcattttctctcacacacaaacctccttcgttttcatttacttctcaggaggtataactactatttttcgctttttttttaaaaaaaaaattgattaaatcttttgccatgggaacccagattttgcgacctcaggactgcttggtagaacgaatcagggctcctccggctgacttttcccggcggaggagttccggtaattactgtaattattattactacaa

SEQ ID NO: 90799 - DNA, 249 bp, Glycine max
  Clone ID: 700904340H1
ctcgagccgctcgagccgccaaaataagttgagtctgagatgactagcccaatttttcaagcgttcttttatttaaagtccatattatctataagtgttttaaattgaaactttcacggtctaatacataaaatttggtacataatcatctcagtttgatatggttgtagctataacagataaaaatgacataaatgcttaactgtttgaactgaactgagcgcccaaaattgaagtcttgattagtgt

SEQ ID NO: 90800 - DNA, 251 bp, Glycine max
  Clone ID: 700904341H1
accggacaaaagctattagttggggccaatttcgcttccgcggggataggaatccttaacgacactggcatccaatttgtggggatcttaagaatgttcgagcagtatgcgctgttcgagcagtaccagcaacgattaagtgcattagtgggagcagcgcaggctcagcgaatcgtgaatcgggcactgttcctcatgacacttggtggtaacgatttcgtgaacaactactttctcactcctgtgtctgc

SEQ ID NO: 90801 - DNA, 239 bp, Glycine max
  Clone ID: 700904342H1
tttcccttttcagctttcattggtgtggcctagctgttttctcaatgggagagccttcatcgctgcagagcgcactttttcgctttggggtgcccttgttgcttgttatcagcttctgttatgctacttctagtgctgtcagaataactcaagtttcagggactgcagagctgccatagacatatctagatgggcatgatgagtagccagtattcggattatttcatcataaagcagta

SEQ ID NO: 90802 - DNA, 252 bp, Glycine max
  Clone ID: 700904346H1
gactgctttttgaatgctgtcacccttcatatgatatgtgatgtatggtttatttcattctggctatgtcttgaaattaaaattctcattgccatcacccaaatttgcccttaatagaattgccatattctttttctatttgttatctcgtgtttggattgtttgcatattaagaaagacatttgttatttcctaaaattatgaatagagaatgcgttccggttaaaaaaaaaaaaaaagggcggccgccga

SEQ ID NO: 90803 - DNA, 253 bp, Glycine max
  Clone ID: 700904347H1
gctcttcaaatcaatctcttctcagaaatgggtgtggctcaaaacattcccgatgcggaggagggaaccttggagattggaatggaatacagaactgtgtctggagttgctgggccattggtcattcttgataaagttaagggacctaagtttcaagagattgttaatattcgcttgggagatggaactactcggcgtggacaagtgctataagttgatggtgaaaaggctgttgttcaggtctttgagggta

SEQ ID NO: 90804 - DNA, 255 bp, Glycine max
  Clone ID: 700904348H1
gtagaatagtaatagtggtaacaaaaggcaacagagaacagaagagaaaggaaaagagagggtttggtgagttacccaagagaaaggatgaagagagagcgccagagcttggttccaacgcaggaacctcaagctgcggttattcaagcggaaaatcgaatctttgggaggaagaaggaggcatggacgagcttcttgcagtggtgggttacaaggtgaggtcatcggacatggcggaagtggcgcagaagctgg

SEQ ID NO: 90805 - DNA, 248 bp, Glycine max
  Clone ID: 700904349H1
agaaaagttagggttcacaacttttccttttccttttgcttgcgaatctgaatcaaataatcaatcatccattcattattcatcatatcgtcggcgaagaaaatcacgctgaagagttcggacggcgaggctttcgaggtggaggaggcggtggcgctggagtcgcagacgataaagcacatgatcgaggacgactgcgccgacagcggcatccctctgccgaacgtgacgagcaagatcctggcgaa

SEQ ID NO: 90806 - DNA, 165 bp, Glycine max
  Clone ID: 700904350H1
gccaaggttgtatgtgaaagactctgatgtgaggcatgagaatgagatcattagcatttgttgtgattctgctccttctttcacccaccattgtcaattctctctccctccctcatactccatctccatctccatctccatctccatctcctccttccacatcat

SEQ ID NO: 90807 - DNA, 249 bp, Glycine max
  Clone ID: 700904351H1
cgacgtgcgtggactctttgaaggtggaattcatctccctacagatgcactcagtaaaattagccccctaccagtgctcaaggaaatcttccgcactgatggtgaactagtcctcaagtttccaccacctcatgtcattaaagttagtaagtctgcatggatgactgatgaagaatttggaagagagatgcttgctggtgttaatccatgcctaattgagtgccttcaagtgtactctccaaagagcaa

SEQ ID NO: 90808 - DNA, 248 bp, Glycine max
  Clone ID: 700904352H1
gtgagagcagaggaaagaaagatgttttttaacggatatgggtatcaagggacatcatcatttgagcagacatttcgatgttactctgcttcgtttattgaaaagcccgaaattgaaaatggtgataaaattataatgcctccttcagtccttgaccgtctagcatttctacgtatggattatccaatgatgtttgaactcagaaatggtgcttctgagagggtttctcattgtggggttctggagtt

SEQ ID NO: 90809 - DNA, 247 bp, Glycine max
  Clone ID: 700904353H1
gttaaattgcaagaagcagcccctacgggaataaaaccgacaaatcgttaaacctcggagccagatattcagagcgggtcccaccgatgatggatactggcggaggaggcggacatcgtcaccgacagccaccatgtcgcggtggaagtttgcggcgtggcggcagttccagcacctgctggataaatcgacgccgcacgtgggacgccggtggctggggttcgcggcggttgcccttttgtacgcg

SEQ ID NO: 90810 - DNA, 249 bp, Glycine max
  Clone ID: 700904354H1
caagaacaagagatttaaaaaaagagaaaataaacaagaaaacaagagagagaatagatagaggatgatggtgagcacatcctctgtttccattcccagtttttgcctttcctcttcctcccattgaagcatttttcacaagcccgtgatttttccgccatctccatcatcgaatgattttctggttcgggttttgattgatgctcggaagatccgatgctgctagatcgaatttgacaaaacccactt

SEQ ID NO: 90811 - DNA, 250 bp, Glycine max
  Clone ID: 700904356H1
tggatgtgttgaaggtgcattgggaatacgtgagtggctggaatcacagggtcatcagtacattgtcactgatgacaaagaaggacctgattctgaacttgagatacacattccagatgcacatgtcatcatatctactccattccaccccgcctatgtcaccgcagtaagaattaagaaagccaaaaatttggagctgcttttgactgctggcattggttctgatcatgttgatctcaaagctgcagct

SEQ ID NO: 90812 - DNA, 240 bp, Glycine max
  Clone ID: 700904358H1
gtcttcctcataagatgcttgtcaagttggttgattgcttgccaattggttgaaatgtggtcaggaaactcttcaacaaataggaagtcttcctgctccgcctttggaattgatgcaagtcaaccttgatgagaaggaaaggtttagggatctgagggctcagaagagtcttaacaccataagacctagctcagaggaagtgaggacttattttaggaaggaggaggttctcaggtactc

SEQ ID NO: 90813 - DNA, 252 bp, Glycine max
  Clone ID: 700904359H1
aaaacgcaaagatgcaagttccattgatcgacatcgaccgaatcaacgatccccaagtgggtctgaactctctgcagaacccatccttcccaatcccttctcagatcacaacctccctcgcttacaatttctgcaaatggggcgcactcattctcgcccttgtcgccaccttcggcagcatcatcaacagagtcactatcttcatcatccgcttccgcgccaaagccccttctctcccatccctaaccctaa

SEQ ID NO: 90814 - DNA, 248 bp, Glycine max
  Clone ID: 700904360H1
gaaaacacagggaaagaaagagttgagtgatggcggcttgtctgcaactgtggcaatgcaaactagcgagaccctttgactcattaccggtgcgaaggtcaattcctttgagtctgaggtgttcggccgcgccctcttcttccaagccgacgcgctcctacagcatcactctcatccccggcgacggcatcggccccgaaatcatctcggtggccaaagacgttcttgtcctcgccggttatctcgaa

SEQ ID NO: 90815 - DNA, 253 bp, Glycine max
  Clone ID: 700904361H1
cctaaaataatgattcttaagagcggattcatcttcggtcattttattttgtataataaaagaaagataataaagagaataatcatattaaatattaaatagaaaaaatggcccgatcatttatcaaaggccaatcttcggtagaagagaaggttcctttggaacacttatttctatttcagtataccgggtctctttctttcatttcaaaaaatttatagaatttcgattttgaaatgaaagacaagtgtgg

SEQ ID NO: 90816 - DNA, 248 bp, Glycine max
  Clone ID: 700904362H1
gtaagatcaagtcattgggagtcaaaatggttatctctggagaaggatctgatgaaatctttggagggtatctatatttccacaaggcacccaacaaagaagagtttcaccaagaaacatgccgcaagattaaagcactccacaaatatgattgcttgcgagccaataaatcgacctttgcctggggtctagaagccagagtaccatttttggacaaagagtttatcagagttgcaatgaacattgat

SEQ ID NO: 90817 - DNA, 253 bp, Glycine max
  Clone ID: 700904363H1
gagaaagtggagcgagaaaaatactgaaaccctccctcgccattcttgttctgctccgtccctctcgatctgcgtcagggattctctggcaggtattgttgatctgttcggttctagatcttttcgtgcggcttttgttgacggcaccgtcatgtcttccctcagcagagagcttgtttttctcatacttcagtttctcgatgaagagaaatttaaggagactgttcacaagttggagcaagaatcgggattt

SEQ ID NO: 90818 - DNA, 253 bp, Glycine max
  Clone ID: 700904364H1
ctctgccttactcactctctactttgctcatcatcgtagatgaaccaacacttctagtctctcttactttataaccatgtaaaaatgagtcacctaatgaaaaattagtagcttcttgttgtgctttttattttgtttgtgttgagataaatttgtttgtttgtttggtattgttttgtgttttatgaattatttgatgggtgaagaaggagaagtggtgagaaagcaaggacaaaggggtgttggtggagat

SEQ ID NO: 90819 - DNA, 248 bp, Glycine max
  Clone ID: 700904366H1
aaaaaaagaaaaaggaaggagataggaaagggttaattgaatccaaaaaaaagaagagaaaaacaaaatgggcagggtttggacttcgatgatagcattgttgctttgcctgatgacatcatcggttcggggcgaggacccttacatttactacacatggaacgtgacctacggcaccattgccccattgggtgtcccccaacagggtatcctcatcaatggtcagtttcccggccccgaaatcaact

SEQ ID NO: 90820 - DNA, 243 bp, Glycine max
  Clone ID: 700904368H1
gtcttctgtccgtacaccactttcttccctcccaaaggagggaaaagattggttcttgagtggtttcaggacttctatttgtggacaagttgtgtgcaatccaagtttttgtgggagacaaataactagaagccatggaaaccgtcttgttgttcactcactgcttggaaggaaggtgaggtccgtgaagagcagagagactgtgattcctgaaccagattacaggattccaattgtgctact

SEQ ID NO: 90821 - DNA, 245 bp, Glycine max
  Clone ID: 700904370H1
gaataataataagcctatattctaaggccggaaaaataaaaaaaggaataacaaaaatgtctggaaaggtaattatctcggctgtttctctcatcctggtggttggagtggccataggtgtggtggtggccgtcaacaagaagggcgaggatcccacacttcaatctcaacaaaaatcagtaggggttatctgccaaaacactgatgaccagaagctctgccacgaaaccctaagctccgtgaag

SEQ ID NO: 90822 - DNA, 244 bp, Glycine max
  Clone ID: 700904371H1
tgagcttttacacggttattcaatcacacattgtttaaaatgatttttaattgattaatagtaccaaattttactgcaacaatgcataaaaattaaactctttagcataattagttcatgacatggttgtttaagcttcatatagttttcaagtaacagcttaagcttttatcatgattggttcatgacaatcattacttccatttaactacaaattcttaacaaggatgatgacaatagaatg

SEQ ID NO: 90823 - DNA, 156 bp, Glycine max
  Clone ID: 700904372H1
caccacaccaatgccaatataccatgtgcaacgaaattcaagcccaagcccaagcccaagcccaagcccaacctgggtttaagctcgtcggtttcaaaaacttcgtccgaaccaatcctaagtcggaccgctttcaagtcaaccgcttccacacaa

SEQ ID NO: 90824 - DNA, 248 bp, Glycine max
  unsure (1)..(248): unsure at all n locations
  Clone ID: 700904373H1
cgagagaagaagggtgagctaaagtcaattttccttcctttcctttccactagtcacataatcctngtagtggacatggccagactcttcgccttgcacgacgtcgacgtcaccatcatcaccaccgcacataacgccaccgttttccaaaagtccatcgatttagatgcgagtcgcggtcgccccatcagaacgcacgttgtcaacttccccgccgcacaagtgggtctccccgttgggatcgaagc

SEQ ID NO: 90825 - DNA, 247 bp, Glycine max
  Clone ID: 700904375H1
cactattcttcttcgcagcaatggcgcgagtggatctggacgggaaccccatgaaggcacttacgatctgcatgatcggcgctggcggcttcataggctcgcatctctgcgagaagctcatgtccgaaacccctcacaccgtcctcgccctcgacgtctacaacgacaagatcaaacacctcctcgaaccctccgattccccctgggccggccgcatcaccttccaccgcctcaacatcaaacacga

SEQ ID NO: 90826 - DNA, 247 bp, Glycine max
  Clone ID: 700904379H1
acaaaatgagattcgtgtacgctcattttcctatcaacgctagcattggcaacaacagcaagtccatcgagatcagaaatttcctcggcgagaagaaggtgaggaaagtggacatgcttgagggcgtgtcggttgttagatctgaaaaggtcaaagatgaattggtcttggatggaaacgacattgaacttgtttctaggtcatgtgctctcattaaccagaaatgtcatgttaagaacaaggatat

SEQ ID NO: 90827 - DNA, 250 bp, Glycine max
  Clone ID: 700904380H1
gattaggtgaagatggatgatgattagctcgcatggtctctgacgcgcttcctttattttttcaagaggatagccgcagggtgcgggcacgtgaagaagaaacggagaaagcaatgcttgaaggtttttagggagtggagatttggtgttcggtttctgaaagggggtgttagtttgttagatagtgatgccgttagtttttaaacgctgttaaaagacggaagggtggggttaagaaatagaaatgttg

SEQ ID NO: 90828 - DNA, 246 bp, Glycine max
  Clone ID: 700904381H1
tggaccctaatcacctcttcttcacgcatttccgcgatggtgctattgcctcacgcattgagggccaacacagaggagctcttccttctgttattgtgattggtgctggaatatctggacttgcagcagcacgaagtctctatgatgcatcttttaaggtgactgtactggagtcacgagataggcttggtggtcgcattcatactgacttctcatttggctgtccagttgacatgggagcctcat

SEQ ID NO: 90829 - DNA, 245 bp, Glycine max
  Clone ID: 700904382H1
aaaacgcattgtgtttctctctttccgcggcgtagatctgagcagtttgggaaaccctaactgctctcaccactctctttgctttttttcctctccgatcaacgacctctttcgtcgccctaagtcatggcaggacttgcacccgagggatcacagtttgatgctcgtcaatatgataccaagatgaatgagttgcttacatctgatggacaggatttttttcacatcttatgatgaggtttatg

SEQ ID NO: 90830 - DNA, 239 bp, Glycine max
  Clone ID: 700904386H1
accaaaactaaaaaagaacatttgcaggaggtataagatggcattagaaaattgaatgttattaatttcttcatccacttccactatttcaaaatcaaaatgattcttatgttcttccttggatgatggcgcttcaactttgctatatgtgaagggagttctgaaaaaaacttgaggaagaagaaaagatttcaataagctatgttgataaagggagatggagaatgatatagagggtg

SEQ ID NO: 90831 - DNA, 247 bp, Glycine max
  unsure (1)..(247): unsure at all n locations
  Clone ID: 700904388H1
gccatgtcactaaagtcagttactgtattgactacatatctcatctatgcatccatagttgctaagtcagctatggatccctacaaggccctcaacatcatcctgganccaaacggaaccctcacacgcttaagcattcctccacaaagccctcctaacacggatnccantctncncanagcggntcnccttgnagatctcagcatcaaccaatccaagcacacctgggcccggatctacctacccc

SEQ ID NO: 90832 - DNA, 56 bp, Glycine max
  Clone ID: 700904390H1
caacaacactctctcttctcgcgcttggcttttcgctcttcactcagtctcattca

SEQ ID NO: 90833 - DNA, 245 bp, Glycine max
  Clone ID: 700904391H1
gcagatcttcgtcaagacccttcaccggaaagaccatcacccttgaggtggaaagctctgacaccatcgacaacgtcaaggccatgatccaggacaaggaaggaattcccccggatcagcaacgtctcatcttcgccggaaagcagctcgaggacggccgtaccctcgccgactacaacatccagaaggagtcaacccttcaccttgtccttcgtctccgtggtggcatgcagatcttcgtcaag

SEQ ID NO: 90834 - DNA, 71 bp, Glycine max
  Clone ID: 700904392H1
ctcgagccggttcattgcactgcaacttagccacttaaaccccattcgttagcctctccacatcttcactg

SEQ ID NO: 90835 - DNA, 121 bp, Glycine max
  Clone ID: 700904393H1
aatcaaacgaggcgctgaactgagccatggcaccgcatgatctccgccgtccgttcaagcgaccagcgatctccgatcaagagcggcgcagggaacagtctctgctccgccaggcacagag

SEQ ID NO: 90836 - DNA, 108 bp, Glycine max
  Clone ID: 700904395H1
caggagctatagactctttagatgatacgatgatggtaattgaagcccctcggcaatcagacttaatgatacagcttataaggacattgaagcctaaagtgatggtga

SEQ ID NO: 90837 - DNA, 72 bp, Glycine max
  Clone ID: 700904396H1
aaatttttaatttttgtgcattatgtcactattgaagaaaaatgattttgacctttttacactggttccaca

SEQ ID NO: 90838 - DNA, 265 bp, Glycine max
  Clone ID: 700904401H1
atttacaacaacaatggcttctgtgcctcaaccaaaaatctcccttctaaccttattcttcttctcgtccttcaccatcattgcgcatgcaattgttcctcaaaacgaaaccttcaaatttgagaactcaggtgaacttggaccctacatcgttgagtacggtgcagattacagaatgataagcatcttcaactctccattccaagttggtttctacaacaccaccccaaatgccttcactctagctttgcgtgtagggctccaa

SEQ ID NO: 90839 - DNA, 237 bp, Glycine max
  Clone ID: 700903695H1
catttgcataacttcgctgatcacgcggatgcaccatctgggtctccccaatttgcgcctcgattcttggcgttggtgctactcgcggcgagtgtggcggtggatgctcaggagaactcggacgtgaagacgctggtgaagtacaagcacgggaagaagtactgcgacaaaggatgggaatgtaagggctggtcaatttactgttgtaacctcaccattaccgattatttccagacc

SEQ ID NO: 90840 - DNA, 254 bp, Glycine max
  Clone ID: 700903701H1
tgccgaagatcattgttggcctcgcttctctctctctgcgatgcattcatttcttcgttcttctccaccatttaatacatattattatactacaaaaacataacctccagaacacatttatatattcccttgttgcatatatactttgttgttgttgttgttgttgttcttcttgtaaatggcgaatgcatctgggttcttcagcccttcggttccccacttcaaagtgagggttaagcctctcaccactgcca

SEQ ID NO: 90841 - DNA, 252 bp, Glycine max
  Clone ID: 700903702H1
ctcgagccgtgtcacaggtgtagcggcgaaactgaggtcgtagaaagaatggcgaaaacgacgtcgttgttgctctttacactgctcctcttcggaaccttagctctcatccaggcgaagatctcgaaggaggatttgaaggaagtgacccacaaggtttactttgatgttgagattaatggaaaagaagcaggtcgtattgtgatgggtctttttggaaaggctgttccaaaaactgcagaaaactttcga

SEQ ID NO: 90842 - DNA, 152 bp, Glycine max
  Clone ID: 700903705H1
cccaaaccgaaaccctaaccctaacggagagatggcggacacttggcatcgatattcgggacggagaaggacagggtgaactgtccggtctacttcaagatcggcgcgtgcaggcacggcgaccggtgctcccggcttcacaccaagccgac

SEQ ID NO: 90843 - DNA, 104 bp, Glycine max
  Clone ID: 700903708H1
ggaataagcaagacagtgacaggtgaaccgatttcgttatcagaacaagaattcgtggattgtgacacacgatatagcgaaggatgcaatggagggacttatgg

SEQ ID NO: 90844 - DNA, 247 bp, Glycine max
  Clone ID: 700903710H1
cgtttatcacactccaacaacgcctttcgctcttaccaccctcgcgggtcattttcttgggaaaactcgtttccaccaagaaaatcgatttcgctggaaacaaacactcgcgaatctccgatgcgactcgtttcactttaattcgatgatgatcgccactatatgccgccctgtgcgttccccgtggacataaccaatggatcgctgcttccgattttttccatgcctcgccgatcctggtcgaagg

SEQ ID NO: 90845 - DNA, 246 bp, Glycine max
  Clone ID: 700903711H1
cttgttctctaggtgatcagcttgccattgccaaagaaactggccgaaggcttgggatgggaacaaacatgtacccatcttcttcattgcttggtcagagcaaggatgctgctgtttcagcagttccagttgatgaattgattgagaaggctgatggatttgctggagtatttcctgaacacaaatatgaaattgtgaagaggctgcaagagaggaagcatatttgtggaatgacaggtgatggtg

SEQ ID NO: 90846 - DNA, 248 bp, Glycine max
  Clone ID: 700903712H1
ggccaggcaagccccactcaaccaccacactactcctcgttcacgctacccctttctgctcttcttctacctttcaagttttaaaagtataaagatggcagagacattcctatttacctcagagtcggtgaacgagggacaccctgacaagctctgcgaccaaatctccgatgctgtcctcgacgcttgcctcgagcaggacccagacagcaaagttgcctgcgaaacatgcaccaaaaccaacttgg

SEQ ID NO: 90847 - DNA, 247 bp, Glycine max
  Clone ID: 700903713H1
ccaactctctctctctctccacttgccaaaggaaaaaggctaaagagaaacccacacacacacacacacacagatatatgtcttccccaagcaagcgccgagagatggacttgatgaaactgatgatgagtgattacaaggtcgagatgattaatgatggaatgcaagaattttatgtgcaattccatggacccaatgacagtccttatcatggtggtgtgtggaaagtaagagttgagttgccgga

SEQ ID NO: 90848 - DNA, 245 bp, Glycine max
  Clone ID: 700903714H1
ccaaaatagaaaatctaaagcgaaacactgaaatcattccatatgatatagcttctctctaaatctgagttctaacttcctcagatttgatcccataccagttattctttgaatcagctatcagtgtatcaatttctacaaactttatgagatgctggatcatgctatctagtttggaatattgagtttgctagttaaagtgttgttttggatggtaaatttggtgcttcatgtctggtgaaaca

SEQ ID NO: 90849 - DNA, 247 bp, Glycine max
  Clone ID: 700903715H1
gaacctcaatctctccgagcagcggtccatttctctcccggaacacccataagatttccggcacggcgatggccgctgttcgcctccttctcctcctcctcttccctttctcctctctcttcctttctgaaaacgaagcccttctcaacttcaagaaatcattctctaaccccgtagctctctcttcctgggttcccaaccagaacccttgctcctccaggtggctcggcgtcatctgcttcaacaa

SEQ ID NO: 90850 - DNA, 243 bp, Glycine max
  Clone ID: 700903716H1
ggcgagagataatggattttcattgagctttctttctttttgtgttagtgagagaaagttctctctctttaactcacaaccctattgcgtgctttgcaatcgaccccgcttatggccaacagtaaccctccctcggagaaatcatcaaggaaaacgcgcggtttgctcagtgagccagggcctggaataagtgcgtccccttcggaggacaatatgcggtatttcaatgtgatgatccttggc

SEQ ID NO: 90851 - DNA, 213 bp, Glycine max
  Clone ID: 700903719H1
caacgctaggggttttgttcagaagccatgtcactattgatgcatgtcatgtgacaaatggcggtcataggtaagagctggtgtccaggcattctgtcacacctgccagggttctttttccatatgggttggttttcaagtgttaaatgtggatgcaattagtgactccatgtattttataggtgagcatatttgtttcatgcgattactttt

SEQ ID NO: 90852 - DNA, 247 bp, Glycine max
  Clone ID: 700903720H1
ctcgagccgtatgattactgctatggggatgtggttgtccgcctctcacctgtgtctgtctgttcagaaacagcttctgttggagagtccactgagaaatcaatgcagaaaactgaagagagtgggattaaaatcgatgtaaatatccaaactggtgaaacttttgtgcaattttctgacctctcttgggttggaaatataactggccttaagaatggtgatattgaagttacttgggctgatggga

SEQ ID NO: 90853 - DNA, 247 bp, Glycine max
  Clone ID: 700903721H1
gaggtagctagctaggcagccacgagccttggcgcattttcttttttctgtgggcgagtataataataattgcagtaaaatggcatttctgaggtcaatagcaactacagcaattgctactatacctgcagccttagcattctcatcatcttcatcatcttctttccctcgctcttcccaatcccccaatccccaaaatagattaggtcttgtcaaaacacttgctactcctccctctgctctccac

SEQ ID NO: 90854 - DNA, 207 bp, Glycine max
  Clone ID: 700903722H1
cgagacagaaaaaggggttagggtttgttcttgtgatcgaagctaagcgaacagaaatgggtggatcagtgagggacgtgaagtcgaagggcgaggtcgacgaggtggtggcgagtggctctccggttatcctccacttctgggcgtcgtagtgcgaacttccaagcacatggaccaactcttctctcacctttccactgatttccc

SEQ ID NO: 90855 - DNA, 249 bp, Glycine max
  Clone ID: 700903724H1
actagcaaagggaaggaaaagtaccttccccaataacccttctctccgatttggcttctctcatcggagggaaacaatcaataaaagaaaaaaaaaacccacaaaaagattataacaaaaaaagtatgaaaggaaaagtactaggttccgcagtttctctcatactagtagtgggtgtggtaattggcgtggttgctgtagttcaaagcccaaagggcgtgaacaacaacaacaatggaggagaattga

SEQ ID NO: 90856 - DNA, 124 bp, Glycine max
  Clone ID: 700903725H1
cttctcactcttcagcagcatttgagagcatcaacatgcagaacccaaagacgtttgctgcacaattgctaccagactttgtggccctaaataaagacaattgaagaaggggaataagatccat

SEQ ID NO: 90857 - DNA, 245 bp, Glycine max
  Clone ID: 700903726H1
ccaactgtaccctccattcttctcctaaatcctaatcctttttcactttcagttctcagcatgggaatttctggaacaacagactatggatcattcacataccaaaaccttgagaggggaacccaactggccctcagaaaagctcagaatttccatcactggggctggtggtttcattgcctcacacattgctcgccgcctcaagacggagggacattacatcattgcttctgattggaagaaga

SEQ ID NO: 90858 - DNA, 244 bp, Glycine max
  Clone ID: 700903727H1
cattgttgttctctctctctctagagttcttatttcctctctctagaattttctatccgttcatccccctcacaaattagggtttttgcgaatcttttattgtctgaaatcgaatccaacgtttcagccatggtttccgattcaatcgccgccgtgccgattccctccgccgcaaacaccaggaacccggggaagaagaagaggaccaacaggtccgcgaaattgaagcagtacaaaatcgatg

SEQ ID NO: 90859 - DNA, 244 bp, Glycine max
  Clone ID: 700903728H1
tagaactagaactagggtttcatctttgccatcagaaacaacaatgatctacgacgttaactctccccttttccgatccttcctcagccagaagggaggctcctccgataagaggaaaacggatgaacagaagccaaaagagcagaaacccaaagccagcgagaacaaacctataatgacagagtgacaacaaatttgctgcattcagttgtagaatgataataggtggtagatattgcatttg

SEQ ID NO: 90860 - DNA, 243 bp, Glycine max
  Clone ID: 700903729H1
gtgaggtagacagacagaggcggcacaaataagaatggcttcaaatcccaaacctttgacttttgaggaggtggctaatcacaacaacaaaaaggattgctggattattatcaatggaaaggtgtatgatatcacgccatttctggatgagcatcctggaggagatgaagttttggtaacgtcaacagggaaggatgccaccattgattttgaagatgtgggccacagtgattctgccataga

SEQ ID NO: 90861 - DNA, 244 bp, Glycine max
  Clone ID: 700903730H1
cctgaaaatcatggtttcaagccttccaaattgagcagttcaccacatgggggcctttctggtagttcaccacatggggttttttctggtagtccacatggggttttttcttgtagtccacatggggggtttcctggtagtcaacctgtgggttcaatgccaaagtcttttccaccgtttcagcatccaagtcaccaacttttagaagaaaatggtttcaaacaacagaagtacttgaagtatc

SEQ ID NO: 90862 - DNA, 244 bp, Glycine max
  Clone ID: 700903731H1
caaagttctaatctttcgcctattgggttctactcctttctctcttcgtttccgatcgatccaattttcttcccatggctacgatcggacacaacaatctcaatgccaaattggttcttctcggggacatgggtgctgggaaatccagcttcgttttgcgctttgtcaagggtcaatttctcgaatttcaggaatcaacaataggggcagcgttcttttcacagacgctggcagtaaatgacgc

SEQ ID NO: 90863 - DNA, 246 bp, Glycine max
  Clone ID: 700903734H1
gtttgctcgcacacgtcgtttttttctttttgttgcttcggagccaactcaacaacaacgccgtgcttaatccttaagaataacgaattacaacaactaaccatgttgcattgtctcaacacttcctgttcggacatcacactcttggaaagacaacgggaagcaaccatcaagtgccagaaccaccaaccaccctacttaacgtatattaacgccgtcttcccttcttcttcttcttcttcttct

SEQ ID NO: 90864 - DNA, 245 bp, Glycine max
  Clone ID: 700903736H1
aaaaaactattttggcttctgcctttccttttccagggagctcattgacaatggctgaaacaaagtgggtcatgaaggacaaaagatggtctctccatggaatgacagctctagtcacaggaggcacccgaggcatagggcatgccattgttgaagagttagctgagtttggagcaactgttcatatatgtgcacgtaatcaagatgatattgataaatgtttagaagagtggaaaaacaaggga

SEQ ID NO: 90865 - DNA, 245 bp, Glycine max
  Clone ID: 700903737H1
cttctcactcttcagcagcatttgagagcatcaacatgcagaacccaaagaggtttgctgcacaattgctaccagactttgtggcctaaataagacattgaagatgggataagatcatagttggtgacattggttatatgggtctctcatattttcttctaatccatgtgcttgtttcttggggagtagtgataaatcttagtgtaaagaaagaaggaattttactctagtataggtttatacct

SEQ ID NO: 90866 - DNA, 245 bp, Glycine max
  Clone ID: 700903739H1
ggaagatgtgtttgagttcctcgggaacgttcctctgctacagaggcttctgggctcgtctgtaaggaagatatctgagcttgtgattctcaaacactatgagccgggagagtatgttgttcgtgagggagaacgtggggatggtctttacttcatctaggagggagaggctgaggttgttggctctgttaatgctgacgatgataatcatccagagtttcaattgaaaagatttgactattttg

SEQ ID NO: 90867 - DNA, 246 bp, Glycine max
  Clone ID: 700903740H1
cttctgagttctaagctaagtctgcttttattcttttctctcccgttatatatatagtatttgcttatatatatatatactacttattaggaactgtgattgcagttcctaatgcagattttaacgcggcgccaaggagcatttttgtgcttctggttgtctgtgttctttgtggtagtagacttttgctctggtgaccatagtacagtcgaggtagtagggttgggagaatgcgcagattgcaag

SEQ ID NO: 90868 - DNA, 242 bp, Glycine max
  Clone ID: 700903742H1
gtcaaattattcctttccaccaggcttttgatgtgaaaaaatgggagaagtttaatagtgaaaaagtagcctcacttgcctatgcccgaattcaaggaaaagcttctcttattgctcattttcagaactcaagcctgatgaacgaagacaaacgttgccgtcctattctcttccatacagatggcccaactgctggtgatccggagccttttcccatgggtgccaatattagactgagacct

SEQ ID NO: 90869 - DNA, 242 bp, Glycine max
  Clone ID: 700903745H1
gtgaattttgaggagctgctacgtttttcaacattgagtaaggtgtatgtatcagacaagtatttgcatggaatcacattgttaattcgcttctagagatttcattcgttcatcttcggtatttaaaggcgcgccataatttctagttttgcagatacatttttctctggaaaaatctctgaatttcggaactctggactatctgctagattgtgcctgagtttgtacttgtggccatggtt

SEQ ID NO: 90870 - DNA, 245 bp, Glycine max
  Clone ID: 700903750H1
ccagagagggaagacgggggaagatttaggaacagattaccttctggaaggttgccagccactcaccatttgtcacctagagagggaagggtccatgacagaataagaggagggttgcaagatgatgagaggagaaactccaaggatcgattgatggggagagaactaccgggtgataggagtgattttgctgcgccaaaaagtctttctgaacttaaaaatgggaggaacaccgagaataggga

SEQ ID NO: 90871 - DNA, 247 bp, Glycine max
  Clone ID: 700903751H1
ctaacgaccatgtgaccatcctcgtcaacatcgaattcagttggttcattatcggtgtgaccgtttttttggtttctttgtacttggttttggtaaaagtttatggggagaagaaggtggagtatttttcgttggggaatgaggatgaagagtcaaacgacgacgttgagtcacaaaagagcggtgcctttgatcacagcagcaaaagcttcattcaggtgggcaaaatcttttctcaaaatgacat

SEQ ID NO: 90872 - DNA, 111 bp, Glycine max
  Clone ID: 700903753H1
gtgatagttaggagataaagaaagtggtatatattgatatatgtgtgtatttcctttgggcttgaaactcaaaactataataatgggttcttcttctcctccggacacgat

SEQ ID NO: 90873 - DNA, 242 bp, Glycine max
  Clone ID: 700903754H1
atcaaaatggttgctgctggtgctgaacatagtgtagcaatcactaaagatgggaatttgtatggatggggctggggccgatatggaaacttgggattgggtgacagaaacgatcgattgctgcctgagaaagtgactgttgatggtgacaagatggccatggttgcttgtggctggcggcacacaatatgtgtttcatcttctggtggattatacacaaatggatggggcaaatacggcca

SEQ ID NO: 90874 - DNA, 244 bp, Glycine max
  Clone ID: 700903755H1
aacactttccacttgtctccgaattagttatcttgagaaacattattcccattgctatatattatggctagcatgaaggttacatgggtggttgtgatcatgtgcatggccgtggtgggtgcaccgctgatggcgcaagccatgacatgcaatgatgtgacggtgaacatggcacagtgcctatcctacctgatgcagggaggaacaccttcaacactttgctgcagcggagtcaagaacattc

SEQ ID NO: 90875 - DNA, 79 bp, Glycine max
  Clone ID: 700903758H1
cgctaattgtttgattctcctagcacaaggaagagtaggacgggaccctcctcatcatcacaaggacctatgtggtgat

SEQ ID NO: 90876 - DNA, 79 bp, Glycine max
  Clone ID: 700903759H1
gcgccgcaattgtcatgacccaaaattatatttttctatcgagtaacctttacaaccttgtgtcgtcaaccaccctcca

SEQ ID NO: 90877 - DNA, 242 bp, Glycine max
  unsure (1)..(242): unsure at all n locations
  Clone ID: 700903760H1
ctaaaacatctcaatgggttcttcttctattccaccttcgagattaaancatgaccatggctgcgatcgngctcctgttcacggtctttgccgtttcctccgccctagacatgtcgtaaatctcgtacgacagcgcccacgcggacaaggccgccacgttgcgcaccgaggatgagctgatgtccatgtacgagcagtggctcgtgaagcacgggaaggtgtacaacgcgctcggcgagaag

SEQ ID NO: 90878 - DNA, 239 bp, Glycine max
  Clone ID: 700903761H1
gattgctgatgtttccaatgctaacggatggggagatgatgacccaaccatctttgagatgacaatcgttgcaaccttacaaggggaattccaattgacaaatggctatgggccaaataaagctccggaaattatgaaggaacattggaacacttttattgttgaagatgatttcaagttcatgaagagtcatggattagatgctgctagaattcccgttggctggtggatagcaagtg

SEQ ID NO: 90879 - DNA, 239 bp, Glycine max
  Clone ID: 700903764H1
cgggaaggcaggaacgccgtcagtatgccccaccgccacagccagccatgtctgccactgcattgctgcagaaagccgcccaaatgattgcagctgcaacaaatgcctcttttcttcgtgggttaggcattgtaataacttcttgatcaacggcataagttcagcaagttaatttgcattggggcaatcagcaattggaaccagaaattgcttcagttcttgaaggtcttggacttggg

SEQ ID NO: 90880 - DNA, 241 bp, Glycine max
  Clone ID: 700903765H1
ataaaacataagagggtatgtttagtgtggctgtttagtgggtaccttgttgccctcataggaagtgataaacaattgcatggagtcccattggaatttttttttttgtggctgaagaaggtgaaaagggggcaagtttcactcttgaagggttttgaggggtgtcaacttctgtttggagactccgaggttgagtttgaaggctcagtgcttcaaggcagaagcttgaggttactaagca

SEQ ID NO: 90881 - DNA, 244 bp, Glycine max
  Clone ID: 700903766H1
cccggcctctcctgagtctccttcctccaacaatctcgcggcgcctctgtctctctctcggtccctccaagtccaatgagtctgcgcctccgctcgccacctctatgtcgttgtgctacgccatcgaggtcaccctcacaacctcaccttctacctctgcctcagtgagtcttccccgccgctgcgccatcgttcctcagcaacttcgggtcgtccttgcacaacgccgtcgaggttgccctca

SEQ ID NO: 90882 - DNA, 242 bp, Glycine max
  Clone ID: 700903771H1
gcgttggtgaatccgtttctgtctccccctcgaactcccctctctctgcgagtttcagctccgccaaaccaagcactactacgttggactctctgctcccaatattcattcacaccatcaacgctaagatcgaagcacgccatgtgtggcgccactgccgacatcaaggctgcacctttagctgatggagaagcagatcacgcggttcttgtgggccccgccagcgaggacgagagaaaagg

SEQ ID NO: 90883 - DNA, 101 bp, Glycine max
  Clone ID: 700903775H1
gtggtgccttatcgctgtggttttcatcgtcttccttctcttatatttcttttttttttttgtcttcgccgcacgccgaaacaatggccggaaaaggagag

SEQ ID NO: 90884 - DNA, 239 bp, Glycine max
  Clone ID: 700903776H1
agtaaagaagccagtgctaggatttgttagtgaagcaatgtctcaaaccatgttgctcatgtctagtgtctctagcagttattccgtggatttgaagaaagacctttcctccaattgaagagtctaagtttaaggcctaagttctctcagttctcattcaacccacttccatcatcaacttctgccccttcttcaccccgtacattcacaactctggccctcttcaaatctaagaccaa

SEQ ID NO: 90885 - DNA, 241 bp, Glycine max
  Clone ID: 700903777H1
gtgttgaacctcatgttggacaaataattttgcaatttcttctgtattgaaccgtttcttggatgatggatgtaactcaagctttaggtgtcagctaaactaatggtttgaatgttgcctttgccagacattaaaaccaatttgtaatctgccttactttggagcagttcttgctatgtgcttaaaaatagtagtttgattggattgccatttaaaaaaaaaaaaaaaagggcggccgccg

SEQ ID NO: 90886 - DNA, 238 bp, Glycine max
  Clone ID: 700903779H1
ctctttgacacaaggaagaagcctaacaatattaagctttatgtccgccgtgtctttatcatggacaactgtgaggagttgattcctgagtatttgggctttgtcaagggtattgtggattccgaagatcctaacaattcaacatttcaagagaaatgttgcaacagaccaagatcttgaaggtcatcagaaagaacttggttaagaagtgccttgagctcttctttgaaattgcaga

SEQ ID NO: 90887 - DNA, 238 bp, Glycine max
  Clone ID: 700903780H1
tctgaatccgcgcagttaggtttgtgattgattgattgatcaatcaaagagagagagagagagggtatgggagatcaagtggattgaacggtgcagaacgttctggaacaggagactctgaagtgattcttcgttggtggtcacaggcggcgtcggcaaaaggaaatgcagttcaatcctctcaattctcttcgcaacggttggttcttcggtcttcatcatctcaacggacccggcc

SEQ ID NO: 90888 - DNA, 240 bp, Glycine max
  Clone ID: 700903782H1
ttgcgccaccgggtttctatctgctgtttgtggtccatcaagaagttccaagccacggtatttgggtccagatggtgtgaaattgtgaattctcgtctctgcctgctcgacaacttcgttcgtatatgttctttttattcaagttatttattgttgtgaatgtctgggagtgaacagattcttgagtgagtatttaaactgtaagatatgggaagataaaattcaaataaagccatttat

SEQ ID NO: 90889 - DNA, 95 bp, Glycine max
  Clone ID: 700903783H1
cctcttctttctcgcattgttccttatctccatcttcttcttcttctccacaagaacaactatagaaaccgctccctccatccactcagatctct

SEQ ID NO: 90890 - DNA, 240 bp, Glycine max
  Clone ID: 700903785H1
ggaggagctatcatctctgatttcattccggcggcggcgatcgccgggtctcgccgcctgaccgccgattacctgtggccggatttgaagaagcggaagtctgacttggacgttgacttcgaggctgatttcagggattttaaagacgattctgatatcgacgacgacgacgacgatcaccaagtcaagccctttgctttcgccgcctcttctcgtctgtctacggcagcgaaatctgtg

SEQ ID NO: 90891 - DNA, 241 bp, Glycine max
  Clone ID: 700903786H1
tctcgagccgattcggctcgaggccgtgatcataaatccttccttgtgtgcaaaaagaagatgagaacatctcctgagatgctatgctgtttttgccctgctccttttaggcagttccttgagattgtagtgaacatgaagtttgatgaagaacctaactattccaggctaatatctttgtttgatggtatgcttggaccgaatcctgcattgaggccaattaacactgaaggtgctcaaa

SEQ ID NO: 90892 - DNA, 116 bp, Glycine max
  Clone ID: 700903787H1
caaaattctcttccgtttcaggattagggtttcaccgttacagtgaaacatggcaaaaccaaagcgaatctctctgcgtatctttgcgctgctcctcttgatttccacacaacata

SEQ ID NO: 90893 - DNA, 238 bp, Glycine max
  Clone ID: 700903788H1
actcactgtcccacctgagcttgttaccaaactagttaccctcgtcggagccatccactgggtgggcaatcacttattcaaacttcacatctcatctcatctctctcgcatccactgaaccaagatccctattccaaaatggccgcttctgcttcttccagtccgtggctggctccaaaccccagcaaaagatggggcgaactcttcttccttctctacacccctttctggctcaccc

SEQ ID NO: 90894 - DNA, 235 bp, Glycine max
  Clone ID: 700903790H1
agcggagatagcaatctcatctcattcatttcaatggcaactcaaggtcaagtcattacctgcaaagctgcggtggcctgggaacccaacaagcccttaactgtccaagacgttcaggtggctccgcctcaggccggcgaggtccgtgtccaaatcctcttcaccgctctctgccacaccgatgcttacacttggggcggcaaggatcccgaaggtctcttcccctgtattcttg

SEQ ID NO: 90895 - DNA, 237 bp, Glycine max
  Clone ID: 700903791H1
ccaaagccttgaccatgaaagcaacccctttagtgctcttcctcctcttcaccatagccaaagggcttcacaaccccaaatgtgatgcttcccatcaacatgaccatgatggttcaaccctccaagtgttccatgtggttcagcccatgttccccatttaggccctcaaagccaatgtcatgggaagagagtgtcctaaagctacaagccaaggaccaagccaggatgcagtacctt

SEQ ID NO: 90896 - DNA, 235 bp, Glycine max
  Clone ID: 700903792H1
catattgcaccttgagaagaagctgctctaatagccatgctttttggttaccgtttcttggcatatctttctctaaggagaatgaaacttcaatctggagcttaaattcaacttgatcactctttgcatgtgggtgataatattaattaaacaaagaatcacatgtactaagaaggaccaataattgaagtacctagcacattagagatagtggcttttttttattttgtcttgt

SEQ ID NO: 90897 - DNA, 238 bp, Glycine max
  Clone ID: 700903793H1
tgggaatcgaatacggtttagatcgttccccacttatgaacacatcgggaatcgttgatgttagctagtttttcgtgacttcattcattccgtagtgaattattgttttgatattttttttctcgagaaaacttcactttccctgaaaatcattccgctctcctctcgctccgaaatccgaaaaggttaaaatcgcggattgaaaaagcgaaattctttttgaaacaacctgcacgat

SEQ ID NO: 90898 - DNA, 205 bp, Glycine max
  Clone ID: 700903794H1
caaaactggaactctgaccctgaataagctcagtgttgataaaaacctgattgaggtttttgccaagggtgttgagaaggactatgttatccttcttgcagcaagggcttctaggattgagaatcaggatgctatagatgctgcaatagttgggatgcttgctgatccaaaggaggcacaagctggtatcagggaggtccacttt

SEQ ID NO: 90899 - DNA, 241 bp, Glycine max
  Clone ID: 700903796H1
ctctctctctagggtttgatcagactcaagggtttaagccatgggaaaaaggaaggcaaaggcaaagcctcctccaaagaagcgaatggataagctcgataccgtcttcagctgccctttctgcaatcaatggcagcagcgtcgaaatgccgccttgaccatgaagaccttgataggggaagctatttgcgggatatgccaagagagctttagcactaccatcacagctttatcagagcca

SEQ ID NO: 90900 - DNA, 277 bp, Glycine max
  Clone ID: 700903801H1
catgtccttactccttacgatccgttctgcagtcactcactgtagttaatgcctcattgtgtttctcattattatttcctaactaacactcttgaccctgacttcttcacttgtgctttttagatcaacaaattaaagtattaaactttgagcttcagttttttgttcttgactacttgtaatttattatggagttgatggggggtggaaaatttagtaggtgttttgttgttgttgttgttggtgtgttgttcttagtggggtcagtggtgggatt

SEQ ID NO: 90901 - DNA, 270 bp, Glycine max
  unsure (1)..(270): unsure at all n locations
  Clone ID: 700903802H1
gaatgagtcaagggagaaagtgaggcaacagggaagggtttggtgggcattggaggcaaccaaaggggcaaattggtatttgcaaacaaccatagggccangcagtgccctcacatcctcattgaaattctcagcaatggctaatgctataactttgaagaagttgatcaggaaggggatacccccagttcttaggcctaagatttggttttccttgtcaggggcagccaagaaaaagtccaccgtgcctgacagttattatgatgattg

SEQ ID NO: 90902 - DNA, 267 bp, Glycine max
  Clone ID: 700903803H1
gttaacaaaagggtactagagcatgcaccatgctcagttggaatctttgttgatcgtgggcttggtggtacatctcatgtctccgcaagtaatgtttcatatcgtgttacagtgcttttctttggtggtggtgatgatcgtgaagcccttgcttatggagctcgtatggctgagcaccctggcatcagattgctggttattcgctttgtaggggaaccaatgaatgaaggagagattgtaagagttgatgtgggtgactccatggca

SEQ ID NO: 90903 - DNA, 91 bp, Glycine max
  Clone ID: 700903804H1
gcatatggaaaggagggagcaacaattgaagagataagatctgcatctgaacttgctaatgctgctaaattcattgataagcttccacaca

SEQ ID NO: 90904 - DNA, 266 bp, Glycine max
  Clone ID: 700903805H1
gcattctcgaatttaacacgaagttttcctcgtactcattgttacattctataaatcaagttcgatacaaccccatcgctaaatcagtgtgcaagcattccaatcgctcccaaaatcttttctaatttgttcataactcaataattctcatcatgggctccttgattgttccaggtgaacatgatcacaaactaaagcttgtttctcttccctttgtatcaaccagtcacctcattcccgtagtagacatagctaggcctttgcca

SEQ ID NO: 90905 - DNA, 260 bp, Glycine max
  Clone ID: 700903807H1
ggaactgttcctttaactgaagattttgcatatgggcatgtcttctacaagttaagacagacaagtgatttgttttgtatttgagaacgcaaagtaactgtttcgatgatgggaaaagcatatctgcctgtctgcccttagagaacaagtcttgaatagatttcggtaaattaaaaatgctcttgctgatcctcttttggaatgattaataaaacattacattattgtatcttctacttcgaccgccgttgtggacaaaa

SEQ ID NO: 90906 - DNA, 259 bp, Glycine max
  Clone ID: 700903808H1
gcttctatcaactctctacctgtcaaagggagcaaagcgtcttgctatcataggatggatttgccttgttttcaacatcagtgtctttgctgcacctctcttcattattaggcgagtcataaagacgaggagcgtcgaatacatgccatttactttgtccatgtttttaaccatcaatgctgttatgtggttcttctatggccttctcctcagggattattacgttgctcttccaaacacgcttgggtttcgctcggca

SEQ ID NO: 90907 - DNA, 260 bp, Glycine max
  Clone ID: 700903809H1
cggctcgagcccaattcttccccctccacccacccagcatatctctctattcctatttattagaccccctcacattaccttcccgtcaccaactactttgactcctttaccataccattacaataattatcaaacctaaccagtaaaaatggtgaccgtggaggaaatccgcaacgctcagcgttcccatggacccgccaccatcttggccttcggcaccgccacgccgtccaactgcgtctcccaagccgattacctga

SEQ ID NO: 90908 - DNA, 257 bp, Glycine max
  Clone ID: 700903811H1
ccacttcaagggacagaatacatttgtgctttaggcagtttagaagcaacaaaatcaagccctttgacttgagtaaattgcgtggttactatgctcaaccaattctttcttgcttacaccttgattcaatccagcaccctgagttcctagcaagagaagatgaagagttgagtgcaggtgatgatgtgaaagtaggagtcaagaggaggaggggtgataaggggtctcctcagtcttcgataagtcgccaggggtta

SEQ ID NO: 90909 - DNA, 258 bp, Glycine max
  Clone ID: 700903812H1
tcagaatccaaaccctaggaaatttccccttcagacgaaaccctagatttcctctcacaaatctctctcagcttccccattctcgggattcggcgtccagatcacagatcccgttcaattttttttccgcatcccccgatcgggtttggattctgaagaaagttcaattccgcacaaattcgagacaattgctgctgtcgaggctcgcgttgcgcatgggtaagattctgagagaaaccgcgaggccgttctcgaatt

SEQ ID NO: 90910 - DNA, 257 bp, Glycine max
  Clone ID: 700903813H1
gttttctgggaatcaacgtgaaggggaagtacatttgggtgttttgcaacagtggtttgggattcactggtggagttctcgggaatttgctctgttggttgtcttgttcttaattttgcttccattggtcttgtaccgtcgcgtagagtcgttgaagttcagttctgcaatatcaactcttcttgctgtggcatttgttacaatatgtaccgtgttagcaatagttgctattgttgaaggaagaacacagtccccta

SEQ ID NO: 90911 - DNA, 258 bp, Glycine max
  Clone ID: 700903814H1
cacagatacttgattctaccgaaaaggctattgagcatagcttggcaagcaccggtcgtgccaatgtgcgagcaacggcaatatactcggagagttcaaagacttcttgcttaacatggcttgtgatgtttgtgatgacatgtgtgtttgtcatggttattcttctaatccgtgtcacatagtgtagttcacgtttcaccgggtaaaataaataacttccaatataactttttttctcaatctttaacagttttcctt

SEQ ID NO: 90912 - DNA, 85 bp, Glycine max
  Clone ID: 700903815H1
attatgtgtctcagtttcatccatctggattcttttgagtgtttctcttctctctccccctaagctctaatttcctctttttccc

SEQ ID NO: 90913 - DNA, 260 bp, Glycine max
  Clone ID: 700903816H1
cgcgtctcctggaggctcactccggagcggggctagtgcacgcccgattcggcttcggcaagaaaaaggctcccgccccaaagaaagcctccaggggatcgggccgagacaccgacagacccctttggtatccgggcgccaaagcgccgcaatacctcgatgggagtgctgtcggagactacgggttcgatccgtttgggctagggaagcccgcggagtacctgcagttcgagctggactcgctggaccagaacctgcga

SEQ ID NO: 90914 - DNA, 267 bp, Glycine max
  Clone ID: 700903818H1
gctttagccatcactaacactcagtctctgaattggggctgagggtttcgagtaacgtttatttttcacgagtttaagatatcatgggtaaagagaaggttcacattaacattgtggtcattggccatgttgactctgggaagtcaaccaccactggccacttgatttacaagcttggaggtattgacaagcgtgttattgagaggtttgagaaagaagctgctgagatgaacaagaggtcattcaaatacgcctgggtgttgacaa

SEQ ID NO: 90915 - DNA, 265 bp, Glycine max
  Clone ID: 700903819H1
taactagaaacagtgtgatgaaaatgaaggtccttgttttcttcgttgctacaattttggtagcatggcaatgccatgcgtacgatatgttccctctccgaatgaacactggctatggtgcccgtactccggaggtgaaatgcgcaagttggaggcttgctgtggaagcacacaacatctttggctttgagaccattcctgaagagtgcgttgaagcaacaaaggaatacatccatggcgaacaatatagatcagactccaaaca

SEQ ID NO: 90916 - DNA, 263 bp, Glycine max
  Clone ID: 700903821H1
atcactagaagtgttggatgcatttctatttctaactaattattgtgcttattattattgttgagaaagaaaagaatggcaaagttaataaaattctttgagttgaacacaggggccaagattccttctgttgggttaggcacttggcaagctgagcctggtgttgtagccaaagctgtcaccacagccattctggttggatacaggcatattgattgtgctcaagcgtataacaatcaagcagagattggttctgctcttaa

SEQ ID NO: 90917 - DNA, 257 bp, Glycine max
  Clone ID: 700903822H1
gttgagagagagaaagcatgaaaatttgtagtgggttttggttttggttttggagttgggtttataatctttaatcttgtttgggagagagagagagagagagagatgtacatagcttccatgggaaggtctttcaaggactccttgaaactgcttgaagctgatattcaccatgccaataccctggcgtcagattttccaagggaatatgatgggacctgccttcagatgagaatgtcatacagtccagcagcaca

SEQ ID NO: 90918 - DNA, 258 bp, Glycine max
  Clone ID: 700903823H1
caaaaagaaggctacaccaacacctccaaaaaaagctgctgctgctgctcctgccaatgatgagcttgccaagtggtatggtcctgacagaaggatcttcttgcctgagggtctcttggaccgatccgaaatcccagagtacttgaccggcagaagtccctggagactatggttatgacccatttggtcttagcaagaagccagaagactttgccaaatatcaggcatttgagttgattcatgccagatgggcaatgc

SEQ ID NO: 90919 - DNA, 256 bp, Glycine max
  Clone ID: 700903824H1
ccttggcccagtatttctgaaagtgctaaaagccttgttaggcaaatgttagaacctgaccctaagcttcgattaactgccaaacaagtgcttgagcatccctggctccaaaatgctaagaaggctcctaatgttccacttggagatgttgtcaagtcaaggcttaagcaattttcgatgatgaacagattcaaaagaaaagcccttagggtcattgctgatttcttatccaatgaagaagttgaagacacaaaga

SEQ ID NO: 90920 - DNA, 256 bp, Glycine max
  Clone ID: 700903826H1
tattttcattgcacagagacacatgagaggtcaactctaactttttctccctcaatttcagttcttctacgttctaaccattcgcaaaacgccttcgttttaatcttacatcctcgttagtcgttagttcttacgcgaaccagctgaatgcacggcaacgtcggtcacgtgaccaatggcttctcatcaattcctcgacaacttcataattcccgatcacattctcgtaccgggctcctccgactccgatgttgaa

SEQ ID NO: 90921 - DNA, 245 bp, Glycine max
  Clone ID: 700903830H1
ctgttaggtgtttcccttttaattaatattacggaactgtgtatgagtgaataagtggatctgggatcttgtattccattgggttgtgattagtctgtgttatatttgggtattgtgctagattactgtgtcttgtgagcatggtgattgagattctccttacagtttttttgtacttgctagataacgtttattgacatggatcactgtttttgtatacatatgtatctggattttgttataaa

SEQ ID NO: 90922 - DNA, 260 bp, Glycine max
  Clone ID: 700903831H1
gtatttccctacctctcccttcaagatgcagatcttcgtcaagaccctcaccggcaagaccatcacccttgaggtggaaagctctgacaccatcgacaacgtcaaggccaagatccaggacaaggaaggaatccccccggaccagcaacgtctcattttcgccggaaagcaacttgaggacggccgtacccttgctgactacaacattcagaaggagagtactcttcacctcgtcctccgtctccgtggtggctgcagat

SEQ ID NO: 90923 - DNA, 267 bp, Glycine max
  Clone ID: 700903834H1
accatatttgctatggctccaatgcttcatatatttaaatgaaggaattgagttcgaaagtggttgtcttctgaagagaatttttttttttttttatcattcatgggtttttttgtagcacatgtagtgcaaggatcagcactagcccttcttggattatggcacaccatccacaccatcagatcttccctggtgaagggccctgccaacttcactgtaagattctggtaccagtttaacactacccctcagtctagacttaacact

SEQ ID NO: 90924 - DNA, 265 bp, Glycine max
  Clone ID: 700903835H1
ctcgcgtgcattgcagccagaccaagcgagaaagggaagagaattcgagagagaaacttcagagagaaagagagagagagagaaactagagagagaaagcaaagcccaaacaccccttttaaccattgcaattctcgttcggtttcagagaaccccttttgaatttttttgaattttctgggaaacagggcgttttgtgaacatcatctgggttctctcgatctccatcttttttttctgggtttccgtgttttctcctcagatc

SEQ ID NO: 90925 - DNA, 278 bp, Glycine max
  Clone ID: 700903836H1
tcggaattcggtcgggtcgagcgattcggctcgagctatactaaggtgaaaaaggagacatggcagctgcaacatctagtgctgtgttaaacggctttggatctcacttcgtgtgtggaggaaagaggagccatgcccttcttgctgctagcattggagggaaagttggtgcttctgttagtcctaaaagagttattgtggcagttgctgctgcaccaaagaagtcatggatccccgctgtaaaaggtggtgggagtttcatagacccagaaggcttg

SEQ ID NO: 90926 - DNA, 254 bp, Glycine max
  Clone ID: 700903839H1
gatttctgagttctgagagactcaaaagttcagagtggtatgggcagtgttgtgatttggtccagaagataacaacacgacactacactcgtgccgttttccttgccttcaaacaaggattggattatattatttatcttgcatcattcatatggcatccgctcccttcattcacgcgcgctgtgattactcgcctagtatttccaatcgcaatagcattcttagttcgcgacaaggcccgttggcgtgtcgtc

SEQ ID NO: 90927 - DNA, 253 bp, Glycine max
  Clone ID: 700903840H1
ttgccttctgcatgttggttctctgtaaacagatactgcaaaagaagaataatattgaatatttggttgggttgaatccctgggttgaagcgttgcagacatcacggctattctaagagtgtctcgctctctcattcatgtcccaactgtacgacggaggacaggttgcgtaactgccaccaacccttcgccgcacggtgggcgtggtgctttgccttctgaaggtggtagcccttcagacttgctcttctta

SEQ ID NO: 90928 - DNA, 66 bp, Glycine max
  Clone ID: 700903841H1
cttagctcaaacctcacctcaataatctatcgtgctagctagcttaatcatattccaattccacac

SEQ ID NO: 90929 - DNA, 80 bp, Glycine max
  Clone ID: 700903842H1
ggaagaagaggttttcgtttggttaagcaagatggatttggaagcagagaaagagcatgaagctgcatttgcagtggcct

SEQ ID NO: 90930 - DNA, 226 bp, Glycine max
  Clone ID: 700903843H1
gtgattctcataaatgcagtgctaacatctattccaatttatttgctatcttttgtcagggtccctaggcaggtgattagcaagataaccagattacaaaggaacttcttatggggtggtgcagctgatcaaaataagatcccttggatcaagtgggaaaaggtgtgtttgccataggaacaaggtgggttgggagtcaaggatatcatctcgttcaacacatcat

SEQ ID NO: 90931 - DNA, 256 bp, Glycine max
  Clone ID: 700903847H1
accgggtgcatactttgtttggacatcaccactcacaaatgctcgtaacaaagagaatcagaaaaggtggaagtttatacaggattttacattaacactacactgggagcttctgtcacagcaagatgaaactgtcgtatggaagaaaactagtaaaaaaagttgctatgcatcaagaaagtctggttctggcccttctttgtgtggtagaggtattgatgtggagactcccgattatcagaattgctaactgcat

SEQ ID NO: 90932 - DNA, 265 bp, Glycine max
  Clone ID: 700903850H1
agcaattcctcttgcattggaaggaaaagatgtgataggacttgcccaaactggttccggtaagactggagcttttgctcttcccatattgcatgccttattagaagcaccacgcccaaaagatttctttgcttgtgtgttgtctcccacaagagaacttgctattcaaattgcggaacagtttgaagctctaggttctgagattggtgtcaagtgtgccgtgcttgttggaggaattgacatggtacaacaatccatcagatag

SEQ ID NO: 90933 - DNA, 63 bp, Glycine max
  Clone ID: 700903854H1
cccgcatcgagcgagcgcgaaggttgagatccaagatccaaaccaaacccccacacaacatac

SEQ ID NO: 90934 - DNA, 249 bp, Glycine max
  Clone ID: 700903856H1
cttggcatattgtgccctccctctttctagctatatccctctctttatacaattaacaaagatatatcatatcatatcaactccaaatgatgaaaaatattgggttgtttcttcttgtggtggtggctacttttgtggtggcagccacagctggtagcttttaccaagactttgaaataacatggtgtggtgagcgtgccaaaatctatgaaactggacatcttctcaccctctccctagacagagctc

SEQ ID NO: 90935 - DNA, 99 bp, Glycine max
  Clone ID: 700903857H1
gctcggatgtcggctctagtagctatgaatgctattatggtgaggaggatactcatatgttgaggaactggggacgtcatggaagtatattgggaaggc

SEQ ID NO: 90936 - DNA, 251 bp, Glycine max
  Clone ID: 700903858H1
tgattagttaacataggaaacatttacttcacaaacacgagcccatccgaagtgtaccaagcataccttgaccagtttagtccatatttcaatctgtttctaaaatcacgcgcggaggaattattgcgtggtggtggcatggttctaagtttcatctctaccaacaaatcttagaaccatgccaccaccacgcaataattctaagatttgttggtagagatgaaacttttgacataataactcctgggggt

SEQ ID NO: 90937 - DNA, 241 bp, Glycine max
  unsure (1)..(241): unsure at all n locations
  Clone ID: 700903859H1
gcagagatgacaggtgggatgtgtggacagaaggtgcaagagatagaggtgacagtggtgatgatgccaaagaaggtggtggacttcaacggcgtaacctccgtctgataagtgagttgctatggggancgccaccgagttcgtggggaaatgcttgggcgcattaggtcatgcagttgatgctctcactgccctgcgctcgccatagtatctccttgcagctgtatcagtgctacgcaga

SEQ ID NO: 90938 - DNA, 102 bp, Glycine max
  Clone ID: 700903860H1
aaaattctcttccgtttcaggattaggcgcttcaccgttacagtgaaacatggcaaaaccaaagcgaatctctctgcgtatctttgcgctgctcctcttgat

SEQ ID NO: 90939 - DNA, 253 bp, Glycine max
  Clone ID: 700903862H1
cagctatactcaaatctgtcgggatggatgcactcaattttgccaacatatgctgatagaagcatgtgtgaatgccaaaaatgccttttataaatcactttttgaatgatattttgtgtgagtttttctaccatttacgtgcattttcttggcaaaaatcacgtttgaacactagttttgtattgcaagagtataaccgctccattgagtgaaagagttgaaaattacatgattttatgaagatcgaagactt

SEQ ID NO: 90940 - DNA, 256 bp, Glycine max
  Clone ID: 700903863H1
agcagacaagcatccagcgcagcatccaccacgtccgcaaaaatcccacaccgcttgcttcccttgcccctcccctctctcacatcaaatccatttcgccaaatttcacatcactcttcacaaacagaaaaatagtcctccgctgccggcaatcctaggtttccggtgacgatgctcccctacgcttccatcccggaggccgtggcggcgctgggtcgcaacctcaccttcgcggagaccctctggttcactactc

SEQ ID NO: 90941 - DNA, 208 bp, Glycine max
  Clone ID: 700903864H1
ctcgttagtcgtttgtaacgcctttgtttgcgttttttgcacagcagaattaacacgtatatagcaagcatggcagtcacactctacgaccttagctctgcctctgggttgaagaagcttgatgagtaccttctcccacgcagctacatcacccggtaccaagctacaaaggatgatcttactgtctatgcagctttgccaactgctc

SEQ ID NO: 90942 - DNA, 262 bp, Glycine max
  Clone ID: 700903866H1
cacaattcaggcttcattaaatatttatgtgacaaagatgccgctgttcagttatgggagtcgtagtatggcacctcaggtaaaaaatgaggtattgatacctgttgagcaaaatagaagcattgatatcctggatattgccggtgatagaactttggtttctgatgtttcacggtcagctgttagatttaataaccaggtgtcttctctaccattagccgtgcatagtggtagaggcagctttactgcggctaattaacta

SEQ ID NO: 90943 - DNA, 255 bp, Glycine max
  Clone ID: 700903869H1
cttttcttcccccaccttctctccgtggaagcgtttcgctgtaaacgacaacaacaaggagagtgacaacggcgatgttttgactgggttggatgaagttgagaaagaggcgcgtggaaatagcaccatgcccgaacgctttaggtacctcgccaaagaagttccgagtcttcctgttaggtggccatggcttgtggtactggcttttctggtctatgcttggagagctgttctatttgaactgtcaactggaag

SEQ ID NO: 90944 - DNA, 250 bp, Glycine max
  Clone ID: 700903872H1
gtgatgactcattaattaatttgtggattttattccgctatctggttattgggatttatgttggattagctacagttggtatcttcatcatatggtatacacatggttccttctttggtattgaccttagtggggatggacatactcttgtgacttacacccaacttgccaactggggtcaatgctcctcatggcagaacttcactgcttctccattcactgctggtgctaaaacaatcacgttgacaac

SEQ ID NO: 90945 - DNA, 248 bp, Glycine max
  Clone ID: 700903873H1
aaaatatgtttgagttttaacgggaattcctacattttgatggacaaaataagaaaaagaaacttattactttagaagtaaaagtattatttaactctctcaagaagaaacatatatatgaaatttgttattatgcttttgtattgttgggttttattttgcagttttgtacttggtcatggatattgaggtggagatctggtttaatgccctttgtggataattaattgcatttgatttcgggatga

SEQ ID NO: 90946 - DNA, 249 bp, Glycine max
  Clone ID: 700903874H1
aaagattcaacaatggcctctgcttctgctactcttctcaagtcatctcctgttcttgacaagtgcgagtgggtcaaaggccagacccttcgccaacctctcgtgagatgtaacccttcctcagcatcagctctcaccatcaaagctgcttcctatgctgacgagctcgtcaaaaccgccaaaacagtggcctcaccggggcgtggtattttggcgatggatgagtcaaatgcaacctgcggaagcgtt

SEQ ID NO: 90947 - DNA, 248 bp, Glycine max
  Clone ID: 700903876H1
ctaaaacatctccagtgggttcttcttcttctattacaactacgtcatacaataccatgaccatggccatggccacgatcctgctcctgttcacggtcttcgcggtttcatcggccctagacatgtcgataatctcgtacgacaacgcccacgccgccacgtcgcgcagcacagggagctgatgtccatgtacgagcagtggctagtaaagcacggcaaggtgtacaacgcgctcggagagaggagaa

SEQ ID NO: 90948 - DNA, 251 bp, Glycine max
  Clone ID: 700903877H1
tagaagagtacaaacgtcttgcaaagaattggagcaaaatgaaagggcttaaaataccaaagaagggtgaaatgagcgccttatcccgaaatatgaatgctcagcacatgagcaaagtcctccctccacagatgctaaagcaaatcggaggcatgggtgggttacaaagcttgatgaagcagatgggatctgctaaagatatgatgggaatgtttggtggtggtgataattagattgactgtggcatatga

SEQ ID NO: 90949 - DNA, 250 bp, Glycine max
  Clone ID: 700903878H1
gtcggtgatcccctttctccttccttctctgagagacaatgacaatgacgtgggcgcgattcgattcgtggaagcagcaatactacaccacaagcggcgtggtggtaggttacgcagtatgctccagcctcctggccatcatcaacaaatacgccatcaccaaattcaactacccaggcctcttaaccgcgctccagtacctcacctccgcactcggcgtctacgtctttgggaaattagggttctccac

SEQ ID NO: 90950 - DNA, 245 bp, Glycine max
  Clone ID: 700903879H1
aattggctaatgttcctcctaattccactgtgtactacgaagctgagctgctttcctttgtaaaggaaaaggaatcgtgggatctgaatacacaagagaagattgaggcagctgggaagaaaaaggaagaagggaatgccttttttaaggttggcaaatatgaaagggcttcaaagagatatgaaaaggccataaagtttgtcgagtatgattcctcctttagtgatgaggagaacagcatacta

SEQ ID NO: 90951 - DNA, 254 bp, Glycine max
  unsure (1)..(254): unsure at all n locations
  Clone ID: 700903880H1
ctcgtttcacatggcttccccaataccanaagagatcgttgcagagattcctacctatatcagagtcttcagcgacggcaccgtggaaaggccaagagaaacaccctttgtgccaccctcaattgatgaccctcaaaccggagtctcatccaaagacatcgtcatctcacaaaaccccttagtctctgctcgaatttaccttccaaaacttaccacaataaatcaagttcccatcttggtcttctttcacggtg

SEQ ID NO: 90952 - DNA, 261 bp, Glycine max
  Clone ID: 700903882H1
ctctctctagagtaattgcggaatcagctagaattttctaataatggccaaagacgttgagcaggttacagagcaaggtgaatactccgcgaaggattaccatgacccacctccggcgccgttgatcgacccagatgagctcactaagtggtccttgtacagagccgccatagctgagttcatagcaacactccttttcctttacatcaccgtgttgaccattattggctacaagagacagagtgacaccaaatccccggt

SEQ ID NO: 90953 - DNA, 260 bp, Glycine max
  Clone ID: 700903883H1
tgttagaagtagtgaagaaaatgaaagtcattgttttcttcgttgctataataattttaggtgcagaatggcaatgcaatgggtcagagcaggagcatgagcatggccacagctaccaaattttccctttgcgaatgaaaaccggccccggtggccactacattccggaggtatcgtgcaaaagttggaggcttggtgtggaagcacacaacgtcattgactggagaaccattcctcaagattgcgagggatatatagga

SEQ ID NO: 90954 - DNA, 124 bp, Glycine max
  Clone ID: 700903884H1
aacctccaatggtacagcagattcaagttgttctgccagaaatattaaatcacctggcctcattccattattatgactaaatttacacgggattcaaataagaaatgatgagtaaattttctga

SEQ ID NO: 90955 - DNA, 250 bp, Glycine max
  Clone ID: 700903885H1
ggcatcttgtgttgtgtccctgtgttaagctatttccttttcttaacacaattggttgtgccaattgccatagtcaccaaccaattaacaaaggtatatatatcatcatatcatcaccaaatgaaaaatattgggttgttttttcttgtggtggtggctacttttgtggtggcagccacagctggtagcttttaccaagactttgaaataacgtggggtggtgagcgtgccaaaatctatgagaatgaaa

SEQ ID NO: 90956 - DNA, 250 bp, Glycine max
  Clone ID: 700903886H1
ggtgcttctcgagtccgcgatttattcaggaaggccaaagagaatgccccatgcattgtgtttgttgatgaaattgatgctgttggaaggcaaagaggtactggaattggtggagggaatgatgaaagagaacagaccctcaatcaacttttgacagaaatggatggatttgagggtaataccggtatcattgtcattgcagctactaacagggttgacattcttgattctgcattgttaaggcgggacg

SEQ ID NO: 90957 - DNA, 251 bp, Glycine max
  Clone ID: 700903887H1
ctcagcacaacacccctcctaaccctctttttctcttaatttctcatcatatcatatctattaatcttacacatatattaagacatagatataatttttttcgttttatttttccttgcatgggctgttaagataagatgtctcgcacgtgctcacagtgcggcaacaacggccacaactcgcggacatgcaccgacggtggcgccgccgcttcctgcggcgggtctcccagggagaacggcatcatgctg

SEQ ID NO: 90958 - DNA, 243 bp, Glycine max
  Clone ID: 700903888H1
taggtttcctttccgcgcctcctcctccacctgctcatgctcctgtccccaaaaagagtgatgttgctgaaagcgaaagggaaagcgataccgatggcgaaagtgagagcggaagcgtcgcaatatctagaaagggaatccgcagatcgtcgttggataaaagtcaacatgattattgtgatagcagccatcttccaccagtggtttcctcccaagctagccgcaaaagcagcaccagatcag

SEQ ID NO: 90959 - DNA, 73 bp, Glycine max
  Clone ID: 700903889H1
acaaaaaatgtgtgtccatggagaaaaactctgttgattatagtccgttgcaggctcctcgaggtgatgaaac

SEQ ID NO: 90960 - DNA, 247 bp, Glycine max
  Clone ID: 700903890H1
aaaaacctctctcagaggttgctcacccctactcttcttccagtctctatctcaatctccatcaaatttaactattgctactgaagaggttttggttgatgaaatcacttaccctaccaagatcactactaccaagcccctatctttgcttggccatggaatcaccgacatggagattcacttcatccatgtgaaattctattcaatcggggtttatttggagccagaagtagtaggccattggacc

SEQ ID NO: 90961 - DNA, 237 bp, Glycine max
  Clone ID: 700903891H1
gagccttcgaagttagtgggcagcaagagctcaagacatttcgagtagaaacagtaacgatgcctcagttgctgtcactgctgcattggaaacatgctgagccataaaatgagctgatgcacgagtgagcccttatcgattaagcactccagtgggacaaattattttccagtttgaaagtatcatcagttggttcatccccataaaccacattgaggaattcatgcatggttgggg

SEQ ID NO: 90962 - DNA, 251 bp, Glycine max
  Clone ID: 700903894H1
gagccttcgaagttagtgggcagcaagagctcaagacatttcgagtagaaacagtaacgatgcctcagttgctgtcactgctgcattggaaacatgctgagacataaaatgagctgatgcacgagtgagcccttatcgattaagcactccagtgggagaaattattttccagtttgaaagtatcatcagttggttcatccccataaaccacattgaggaattcatgcatggttggggcttgctttgtaaca

SEQ ID NO: 90963 - DNA, 210 bp, Glycine max
  Clone ID: 700903896H1
gtcacggggcaagatggacccgaacgcgaactggaacagtttcatatcatagaaatcaacaaactcctgggtccgtcagttctcatggaagtgcccctttgccggggagaaaagctcagacggtgaatgggaactacttgctgaattttcaatatgacccaatatcccgttctcaaccacggggtcctcctccttctccacacagacata

SEQ ID NO: 90964 - DNA, 172 bp, Glycine max
  Clone ID: 700903901H1
acagagatgaaaaatactcaaaaagatagactaatttccggggtttcggttatagcataaacttcactttatttcttttttataaaaagaaaaccatagattatcgctatcttatatcttattccgggtctcagattcaactgtgaggaagaaaaaggtctccacacaacat

SEQ ID NO: 90965 - DNA, 247 bp, Glycine max
  Clone ID: 700903903H1
gtaatttccttccttcctttctttctttctttctttctttatcttctcatttttctcaatacaatttttttctttctttctcaagttttgctacttttctcttcttaaccatagttcacatattatatcatcacatatcatagtgatatcatatcacaatgtgtggcatacttgctgtgcttggttgctctgattcatctcaagccaaaagggtccgcgtccttgagctttctcgcagattgaagca

SEQ ID NO: 90966 - DNA, 246 bp, Glycine max
  Clone ID: 700903905H1
gtgaaagtgagacaaaataaaaatcaaagagcataatgtcagggatcattcacaagattggggagacccttcatgtgggagggcacaagaaggaggaggagcataagggtgagcaccatgctggagaatacaaaggggagcaccatggtgaacacagtagtgagtacaaaggagagcatcatggtgaacacaaagctggagagtaccatggtgagcacaagccagagcacaaagaggggttcctag

SEQ ID NO: 90967 - DNA, 245 bp, Glycine max
  Clone ID: 700903906H1
ctttctcctaaaacatctccagtgggttcttcttcttctattacaacaacgtcgcccaagaccatgaccatggccatggccacgatcctgctcctgttcacggtcttcgcggtttcatcggccctagacatgtcgataatctcgtacgacaacgcccacgccgccacgtcgcgcagcacgaggagctgatgtccatgtacgagcagtggctagtaaagcacggcaaggtgtacaacgcgctcgga

SEQ ID NO: 90968 - DNA, 243 bp, Glycine max
  Clone ID: 700903907H1
aacaaaattgcaacaacaattgagcttccgttgaagaaataattgttattttttttttcttcttcctggattttgatttttttttattatctaattgtacgttcagatgagtttgagtatgagcttgtgcggtaattacagtcttcagcttcaaaatcgcagaatcgtaagctgcaatcttcaccaggatggcaggcatattgttcccatcaatacgcaccaaaaaccttccaaacctgaaaa

SEQ ID NO: 90969 - DNA, 246 bp, Glycine max
  Clone ID: 700903911H1
tccatttccatttcctctctctcagtttccaagaatcttaagctatgggaaagtcttacccaaccgtgagcgctgattaccagaaggccgttgagaaggcgaagaagaagctcagaggcttcatcgctgagaagagatgcgctcctctaatgctccgtttggcatggcactctgctggaacttacgacgtgagctcgaagaccggtggtcccttcggaaccataaagcacccctccgaactcgctc

SEQ ID NO: 90970 - DNA, 246 bp, Glycine max
  Clone ID: 700903912H1
tagtaacccttcttttctctctctctctctcgtgttctgagctgctagaagcaatggggaggcaaagaagccatgcttctttcaccatgtttgcaatgcttgttggattgctctctcagagccttgtcatgcctgtaatatccaccactgttgcagatcagaagaactactacaccccagatccacatgctggaagtccccccacaggctcacacaatagtagtcctccatctcatggccatggga

SEQ ID NO: 90971 - DNA, 247 bp, Glycine max
  Clone ID: 700903913H1
gcagaaagcaagctcatcctagagttttaaaaatggcagcagcctcctccatggctctctcttccccatccttggctggcaaggccgtgaagctgggcccatcagcccccgaagtcgggagggtcagatgaggaagaccgtcaccaagcaggcctcctccggaagcccatggtacggcccagaccgcgtcaagtacttgggcccattctctggcgagcccccgtcctacctcactggcgagttccca

SEQ ID NO: 90972 - DNA, 249 bp, Glycine max
  Clone ID: 700903914H1
gagaagcatcgccgactgtcaaatgctttcattaggcagaatccaggtttgttggagaaatcactttccatgatgctcaaggcaccaaggctgatagacttcgataacaagagagcctatttccgctcaagaataaggcaacaacatgaccaacacttgtctgggccattgcgtataagtgtaaggcgggcttacattttggaggactcttataatcagctaaggatgcgtcctactcaggatctgaag

SEQ ID NO: 90973 - DNA, 242 bp, Glycine max
  unsure (1)..(242): unsure at all n locations
  Clone ID: 700903917H1
ctaagtgtgagagaaagaaaatgccaaagtctcaatttcgaaccccatttcttgtttctttatctctattgttattcatcttcaacctcaccccttcatacgcactctatggagcatccacacccgtgcttcaactcantccctctaacttcaagtccaaggttctgaattcaaatggagttgttcttgttgaattctttgctccatggtgtggacactgtcaggctctgactcctatatgg

SEQ ID NO: 90974 - DNA, 222 bp, Glycine max
  Clone ID: 700903919H1
gaaacaaagaagtgaaaataacagcaaaaagtaggagctgcagcagctcccccgaagcttatctcagcggcagactctgaaagctgtttgagtagcctcaacccggagaatagcaccaatgggagaggaggaaaacaaaccagaggaacccatggcaaaggagaaaaacccagaggaagaagcaacccaagagaaaaaaccggagcaagagttcaaagagga

SEQ ID NO: 90975 - DNA, 244 bp, Glycine max
  Clone ID: 700903920H1
agaggaggcaatgacggtaacaacaacaacagtggaagtggtgctattccaggttcaccgcagcttcctcaatcatgcactactttctccaccaactagctgaattttgagaaactatatacttaatttctctatgtatatacacaaattaaaagagaagattaggcatgctcgcgcttaatttactgtgtttttattttcttatatgtaaaacagattaagagtcacctctgattctgaatgc

SEQ ID NO: 90976 - DNA, 243 bp, Glycine max
  Clone ID: 700903921H1
attcacagctgtcacgccgttaacggaaaatggcaacggcgagacgcagtttcccgcctatcaccgaatgcaacggaacgacaccgtgcgagtctgtggccgccgacctcgacggtacgctcctcatctcccgtagctcgttcccgtacttcatgctcgtcgccgtcgaagccggcagcctcctccgcggcctcatcctcctcctctcccttccgttcgtcatcatcgcctacctcttcatct

SEQ ID NO: 90977 - DNA, 243 bp, Glycine max
  Clone ID: 700903923H1
accgggtggatactttgtttggacatcaccactcacaaatgctcgtaacaaagagaatcagaaaaggtggaagtttatacaggattttacattaacactttgctgggagcttctgtcacagcaagatgaaactgtcgtatggcagaaaactagtaaaaaaagttgctatgcatcaagaaagtctggttctggcccttctttgtgtggtagaggtattgatgtggagactccctattatcagaa

SEQ ID NO: 90978 - DNA, 241 bp, Glycine max
  Clone ID: 700903926H1
caatgtcgaacgggtactacgaagggaggaagagcagcagcgccgtcgcggactacgaatctagcgacgacgagcggcacttcaaacggaggccgtcgaggtacgagccgtcgcccccgccgcagccggcggagtgggaggaggaagggaggcattcgagaggaacgagggagcggaagcataggtgacttgcaattttgatagagttgtgccggcagccattctgccaacgacgaaggga

SEQ ID NO: 90979 - DNA, 244 bp, Glycine max
  Clone ID: 700903927H1
gtgagagtgtgagtgagatagagagagacgcttcgcaaatctcaatcgaatctcagaaaaatgagagaaatcatcagcattcacataggtcaggccgggatccaggtcggaaactcctgctgggaactctactgcctcgaacatggcatccagcccgacggcatgatgccttctgactccaccttcggtgtagcccacgacgccttcaacaccttcttcagcgcaaccggatctggcaagcacg

SEQ ID NO: 90980 - DNA, 245 bp, Glycine max
  Clone ID: 700903930H1
gtttaaacctaattctcatttcttcatcgttcgattcttctcctcctaaagatgcagatcttcgtgaaaactttgaccggtaagaccatcacccttgaggtggagtcctccgacaccatcgataacgcgaaagctaagattcaagacaaggaagggatcccacctgaccagcagagacttatctttgcgggtaaacagcttgaggatggtcgaacccttgccgactacaacatccaaaaggaatc

SEQ ID NO: 90981 - DNA, 246 bp, Glycine max
  Clone ID: 700903934H1
gcttaaaaagcccaagaaatttggcttgtcttggacgattaactggatctgcattattcttggggtaatgttgatgatagtatctccaattggtgctctaaggaatatcatattatcggccaaaaactacgagttcttctcataaactattgatgcaatcattgattccccaaccgattttaaagttgatgagtgaaactaaataacaagaaagcacgcagacatgcgttatacattgaatataga

SEQ ID NO: 90982 - DNA, 241 bp, Glycine max
  Clone ID: 700903938H1
atttttccctcattccttacattagattcattttcaaagtcattgacatagattatgttggtggagagtctagtgaagagatgaagtcatgggaattgtggggtggtaatggcaggcccttttgctccaagggaacttggcatattgctgtgcaacataccaaaaatttatccatagagatgcatgaggccgagtttgttgttctttgcattgggacatatagtggttttccacacattcc

SEQ ID NO: 90983 - DNA, 240 bp, Glycine max
  Clone ID: 700903939H1
aaaaaatggcagcagcttcttccatggctctctcatccccatccttggctggcaaggccgtgaagctgggcccatcagccccagaagtgggaagggtgagcatgaggaagaccgtcaccaagcaggtctcctcaggaagcccatggtacggcccagaccgagtcaagtacttgggcccattctctggcgagcccccgtcctacctaaccggtgagttcccaggcgactacggctgggaca

SEQ ID NO: 90984 - DNA, 219 bp, Glycine max
  Clone ID: 700903941H1
gtgaagttggaaacaatgctagcttcttcgctctccttcctccattcttgcacatccccctcttccccttccttattgtcaatttcacctccaaaccccaaaccctctcacttcctacctttcgtggtcgaagccaaagacaggacccgcaggatagacaggaccggctgccacactcgcagcagaaagaaggacgaagggacgcccgagaggccgagg

SEQ ID NO: 90985 - DNA, 238 bp, Glycine max
  Clone ID: 700903943H1
ggcacggcatgtgggagtgtgtggacttcttccctgtgtccaaggagaatgagaatggattggatacttctattagtggggctgaggtgaagcatgtgatgaaggtgagcctggatgatgatagacatgattactattcaattgggacttatgatgagaagaatgttctgttcacaccagatgatgcgcggaatgatgttggcgttggattgaggtatgactatgggatattctatgc

SEQ ID NO: 90986 - DNA, 244 bp, Glycine max
  Clone ID: 700903945H1
tgaaaaacgaataagaaaaaattggatgagtgatacatttcttggcagacacttgactgaatctgagaattcagagtgtagaatccatttacatcagaagaattcgtcagtgaaagaatcgttttcttcagatctcacaattagagtgcgatggaatatctagggattgatctaagctgcgccgttggatctctccgccacggccagttcccggagaaggattgcttgctccctctcatttcca

SEQ ID NO: 90987 - DNA, 247 bp, Glycine max
  Clone ID: 700903947H1
ctcgagccgaatcggctcgagaggaaatactacgggagtggaaaaacaaaggaagcaccacggagagaatcacagcttaacgggttgcacaattttctcgtggaaaaagaggaagaaattgtgacggccctcaagcatgatttggggaagcattacgtggaggcttttagagacgagcttggaacattaatgaagaccttaaacttggcaaccaagtctttgacaaattggatggcggggaaagagg

SEQ ID NO: 90988 - DNA, 232 bp, Glycine max
  Clone ID: 700903953H1
cagcagcttaaatgcagagttagctttggacaagggtgtggacagttgatcatacaagtaaaaggatggaaaagcattaaagtaggattgaaaatatatcactgaagaaataaaacaaaaagagtttatttaaattgagtgttccatttatttatttttcatatttttacgtgtatcctaacgtttcttggaggcttttgatttggggtgaaaaaattgctttgcttactat

SEQ ID NO: 90989 - DNA, 238 bp, Glycine max
  Clone ID: 700903957H1
gttggttgaagggtcgtgatcatgatcaaggtgacaatactttccatggcttggcaccgctacaagggttgcgagtggaaggggatagtaataataatattggctcaaaagaagtgaaaggtgaaggacaaaacaggtttgagtggagcaataataataacaacaacaacaacaatggtggtggtggtcaaacccacatgcgtcatctggttttgaccaccaccaccattgttgttgt

SEQ ID NO: 90990 - DNA, 239 bp, Glycine max
  Clone ID: 700903958H1
gagttagtgaatctcaacaagtgagttccctcttgcaggctgccgataactggttaaggctagttcaggttcatcacccggattttcagttctttaaatcacatggcacataccatagatgaactgcatgagacgacatgtctttcctgcttttggctaaaactgagccttaatttctgtgttcattgcttggtgcaaacttgataaaagtccatccatctgtagagattgtgatggcg

SEQ ID NO: 90991 - DNA, 237 bp, Glycine max
  Clone ID: 700903959H1
cagagagtggtttcagtgagtgatcggtgttcacttgatccttcataagttctcatcatcatcatcatcatcaccgttgattgaagaagatgccgatcagaaacattgccatcggaaggccgaagaggctactcaccccgacacgttgaaggcggggttggctgagttcatctccaccttgatcttcgtgttcgccggttcaggttccggcatcgcctacaacaagctcaccgacaa

SEQ ID NO: 90992 - DNA, 240 bp, Glycine max
  Clone ID: 700903961H1
cagttatgtatcactagcctcaatacggtgcctttgttcgtttggtttctcaaacaacacaacagtgaatttggcgtctcagatatggctgcgagagagagtattcattcatttggtgattggaggagaataccaatttgcactttctgtcaggatgccagactagtttttcaagcagacagtcttggtcgggcaattttgtcaattgcattgcctgcagcactggctttgacagctgat

SEQ ID NO: 90993 - DNA, 245 bp, Glycine max
  Clone ID: 700903962H1
ctatagtaaaaaaaggacattcattcatctatggctacccttattgctcccagcaaccactctccccaagaagatgctgaagctctcagaaaggcttttgaaggatggggaactgatgagaacactgtcatagtaattttgggtcatagaactgtgtatcagaggcagcaaatcagaagagtttatgaggaaatttaccaggaggatcttgtgaagcgcctagagtctgagatcaaaggagactt

SEQ ID NO: 90994 - DNA, 211 bp, Glycine max
  Clone ID: 700903963H1
gagtctgcatctagacgaaaacacaaggatgcatctagagatgggtctggcagttctcgtgaacttgaatacgaagctaaaaggatagagaaggagaagggtccatcctcgtctgatcagaggaaacaggatatgtcatacgcggaagatgctcctgcaagggaagaaggccttgcatctatggcagcagcaaactccatcaccaacaata

SEQ ID NO: 90995 - DNA, 241 bp, Glycine max
  Clone ID: 700903967H1
tgcttccatcctccacaaaagatttaacctgttattaccaatgctcctccgcatttcatgcggaatagaccttccaatctttcttctgaacattgtttccctctatattctgtcagtgattggaagctacttcagctttgtcaatctgctatatattggttttctctgcatgcaaacgctgccaattgtgtatgaacggtatgaggaagaaatcaacaactgggtcggcgatgtcataata

SEQ ID NO: 90996 - DNA, 239 bp, Glycine max
  Clone ID: 700903968H1
aagaggctctccatgccaatgtaaccaacctcaaacatgactgggaaccctgcagcgatgtcataacaaagtgggttgatcaagcttcaacagttcttccacttttacatgaattcctcaacaatagcctcagggtttggattttcagtggtgacacagatggaagggtgcctattacatcaaccaagtattcagttaagaagatgaaccttcccattaaatctgtttggcacccttgg

SEQ ID NO: 90997 - DNA, 238 bp, Glycine max
  Clone ID: 700903969H1
gttgtgggctgctccagcctctgtctgtggttggtcttatcttttgctgaaacttgaaattgaatctctctcaagcttcctttcttaaaaggttaggaatttgaagcagaagtaagaactaggaagagatgggagtggatttgagacaagtggtggcaggtgtcctcaccctcacaatgtttgtaatgcttggaaatatgatcaaaagagaccacttcgataattcacttcaagaaaa

SEQ ID NO: 90998 - DNA, 228 bp, Glycine max
  unsure (1)..(228): unsure at all n locations
  Clone ID: 700903971H1
cggctcgattctgcagcatatatttgtactcctgactgggcggcaactagatgaagcagtgcagctggctgtgtccaaaggagatgtgaggttggcttgtttgttaagtcaggctggtggttctactgtgaatcgctctgatattgcaaggcaacttgatattntgagaaataaaggcctggattttagtttcattgaaaaggacagattgagactctatgaattgct

SEQ ID NO: 90999 - DNA, 74 bp, Glycine max
  Clone ID: 700903972H1
aagcaaccatggcaatggcaacccaagcctctctcttaaccccagccctctccggtctcaaagtcagcgaccgc

SEQ ID NO: 91000 - DNA, 241 bp, Glycine max
  Clone ID: 700903978H1
gagctcctgagccaataaaacaatctctctgtcttcccttgaagaaggagaaatggggggaaattaaaagggaaaaaggcatataaccggaaacaatcgcgtttcgaattcaaaatcactcgtttctcgcttctcctttcgttcgacgcatgaatgcaggggcttcaccgcttcagacttcagtagcagagtgacagaaattagaaactcaaaaaagtaggcgcaccgagtgagaaaccat

SEQ ID NO: 91001 - DNA, 246 bp, Glycine max
  Clone ID: 700903979H1
cctctgtgacatttgtgctgctagttcatatatttgcggctgacaccgagaaggaaagcaggaaaaaaacaaaaaggagcagatgggtagctcaggtttctcatggaaattggcggatcatccaaagcttccaaagggtaagactgtggctgttgtggtattggatggttggggagaggccacacccaatgagtacaactgcatccacaaggctgaaacaccctgcatggattcacttaaaaaggg

SEQ ID NO: 91002 - DNA, 226 bp, Glycine max
  Clone ID: 700903981H1
gatgtcagagagcctgaaagtatagtacattctggaagacattcaagtaaaaggtcttctttcttacgatctataagccaagagtcactgggagtaggaaacagtggccgccattcattctcagcatcatttggtgtgcccacatctgttggcttcatagaacctgcaggtgaagggcctcaagatcctccttcaacagctccttcaccaccagaagtgcctcttt

SEQ ID NO: 91003 - DNA, 243 bp, Glycine max
  Clone ID: 700903983H1
cttaaattggcttccttatcttgggggaatcccgacattcaaagctatattgtgtttaatgatagcttttggtgttacaccaacagtcacatgcaatgttagtaatgtttacaaggttgtgaagggaaagaatggaagcatgccacttgcattggcaatgctttacccatttgttgtacttgtgggaggagtgcttgtgtgggattatttgtcaccatcagacatcatggggaaatatccaca

SEQ ID NO: 91004 - DNA, 234 bp, Glycine max
  Clone ID: 700903986H1
gcagagagtgcggtaggctcatccgagaccggaagcagcaatggggatcgatctcaaggccggaggtacaagcaaaaaaaccaaaagaacagcacccaagtccaatgatatctatcttaagctcttggtcaagctttatcgcttccttgttcggagaactggcagcaaattcaatgccgttatactcaagagattgttcatgagcaaggttaacaagcccccattgtctttgtc

SEQ ID NO: 91005 - DNA, 234 bp, Glycine max
  Clone ID: 700903987H1
ctcgtattcaacttttggattggcaatagagttgtctgagacccgagaagacagcgggaatggattcctcatttaatttggcttttcttatcaatggaagcccatgcatgcacatagatagatgaaaagtgaaaactagtctcctctatatatccttgtcgttggttacacgtttggcctatagagaaaactaattttcaaaaaatgaatggtaaacataaaactggatcacgg

SEQ ID NO: 91006 - DNA, 221 bp, Glycine max
  Clone ID: 700903992H1
agagaatttgccttgaggtcatttaaaagtggtaacacccccatattggttgccaccgatgttgctgcacgtggtcttgatattccccatgttgctcatgtggtcaactttgacctgcaaatgacattgatgattatgtacaccgaattggaagaacagggcgagctggaaagaaaggtcttgcaactgcattctttaatgacaacaattccacactagat

SEQ ID NO: 91007 - DNA, 246 bp, Glycine max
  Clone ID: 700903996H1
cggctcgagcggctcgagtcgtctttcattttcttattcttcaccgaaccgataagcaggtgagactaatccatcatccaaacctttccgatccaatgacctctaaactaattgcttccaatctccgtcaccaaatcacaaaatcagctcaaaaccttcgccgccagcttctttccacggcggcggcggtgccggtgcctgaacacgatgggaacaactccaactcgtcgggaatgacgatgaagg

SEQ ID NO: 91008 - DNA, 239 bp, Glycine max
  Clone ID: 700904001H1
gtgatgcctcactattgtctctctcttgttctgtcttttctctccttctgatttggctatcacacacttctctaagggatagaggtttatgaataattttctagtcatggtgctggaaagaaatcttgttggtgaagccatcatgcactgctttggtgtcctcttcaatgttggccctcactagtgtcatctccatctccttgtcctcaatagtgaaacttccttgggataacctctgg

SEQ ID NO: 91009 - DNA, 254 bp, Glycine max
  Clone ID: 700904003H1
tctcgagccgaatcggctcgagttcaatttcaatttcaatttcttactttctagacgttacattctctctcttccaaagtcacacacacctcattctctctcttcttaaccctctctgatgtttcctcagtttcatcgatgtagagtgaagccttaactcttctgcttcttccgtgttcagatctcgttgttgttgcttccgattctttgattcttcgcttttttcttctcacttcacattccgattcgtcgca

SEQ ID NO: 91010 - DNA, 175 bp, Glycine max
  Clone ID: 700904004H1
caaatttctccatagttatgggcacttccattctcgacgacctgaacgttcgcgtcccaggttccggcgacaagtaccttgtcctggcccacggcttcggcacggaccaatccgcgtggcagcgcgtgctcccttacttcacccggcaactaccagcgtcattctgctgacgacc

SEQ ID NO: 91011 - DNA, 251 bp, Glycine max
  Clone ID: 700904006H1
atcgcgtttgggagaagaagagcaaaatcgctgtgaaaatgagcggaacggtgaagaaagtcagcgatgtagcattcaaggtgggaaggaacatcgattgggatggaatggcgaactactggtctccgatgaggctcgcagggagttctccaatctccgtcgcgctttcgacgaggttaactcccaactccaaaccaagtttagccaggaacctgagcccattgattgggattactatagaaagggaattg

SEQ ID NO: 91012 - DNA, 252 bp, Glycine max
  Clone ID: 700904008H1
aataaccactaattctcccaactcaatttgtctctcaaccggcccaatgtagcataagcccagcatggccaccgcaacagcagcagccaccgggtccttcatggggacgcgcctcctggaggcccactccggggcggggcgggtgcaggcccggttcgggtttggcaagacgaaagccgccgccccgaagacagtttccagggggtcgggctccagctccgataggccctgtcggatccgggcgccaaggcg

SEQ ID NO: 91013 - DNA, 252 bp, Glycine max
  Clone ID: 700904010H1
ggtaactggaattcagaaccacagtgaaaaccagaatgacgatgggagtgaactactaaatagcactactgccagaggtgctgaaagctggacagaatctgagattgcaaggcttcaacagttgagagctgagatggagacaaggtatatgcaaagtgggtgttcagaagaggttatgtgggaggaaatagctaccaaaatggcttgttttggttacgaaaggagtgctgtggtcttcaaagagaaatggga

SEQ ID NO: 91014 - DNA, 246 bp, Glycine max
  Clone ID: 700904012H1
ataagttcaaaaaacaaggcaaataaggcaaaacaccggatacatcatactactgggtcaaaatcctttctagcagtcagctatgatgcacgtgacccagtgactggaaaggagcccgatttgcagactttttggcagttgacacacaaaagggacaacggggaatggattgacgaagcatctaaggaaatcaatgacaaagttgctgaacaaattaatgagaagagatgtcaaatagaagattct

SEQ ID NO: 91015 - DNA, 154 bp, Glycine max
  unsure (1)..(154): unsure at all n locations
  Clone ID: 700904016H1
gttaaaggaggtgaagctccgtgatgattattatgtaatggaccctgaaaaggccgtggaattggtggatgagaacactatttgtgttgctgctatccttggttccacactacatggagcatcannnaagatgtgaaaacgcttaaaatgatct

SEQ ID NO: 91016 - DNA, 253 bp, Glycine max
  Clone ID: 700904017H1
gcacattcagggaatgagctcaactgggaacctagcagagtttaatgcagcaggaaatcgacaccgcccccatcatggactttatcatatgtggaatgggtccaacttgcatcagcaacctccttcaaattccatgctttggcagaaaataccatcctttgttaatggtgcttgttctccaggtcttccacagatacccagcttttctagaacaccgcctcatgtgcttagagcatctcatatagaccatcaa

SEQ ID NO: 91017 - DNA, 255 bp, Glycine max
  Clone ID: 700904018H1
ccaaatatcaggaatgctgaggttttcttgttttctctttgtatgggaggaatcatgtattacttggaacatgagccagagaccatggctccatttcttcggggtctgatccgtcgcttccttgccagcagaatcagcaatccaagcccacctagtcagactgcttcctacacatacctgcaagctcttgatggcataacaaaaccagcattacaggagaagagggatactgaatcttcttcccaaaagtacaac

SEQ ID NO: 91018 - DNA, 253 bp, Glycine max
  Clone ID: 700904022H1
agcgcaccgaaagcaaagtgtctctctaacctctgcaaaagtccaaggttgcacggttttaactgcttaggtttttgtcttcaaaattaaaactgtgcaactttggttgcaaagtcataggggttaagttgtgtttgcatgaaagtgggcttgagataattgtgcctcttgtatgatggaatccctttggaagcttttgtatttgctggagcgtgcgcctgtcacacttatcactacagctgtggctgtgaca

SEQ ID NO: 91019 - DNA, 255 bp, Glycine max
  Clone ID: 700904023H1
cacagacacacccttccatcaacgttaactccgtcaaaatcaacggcaaaaaggtttctttcgacacccccttgggtgggggtgctcagctgagcacggtggtgccttacaccactctccaaacctcgatctatgcaaacttcgaaagcgcttatttgaaagccgcttcgtctatgagcatgaaaagggtcgatccagtttccacctttgggctctgcttcgaatccaacggcgttggaagctcccaagtggggg

SEQ ID NO: 91020 - DNA, 249 bp, Glycine max
  Clone ID: 700904025H1
aattaattcgcttgaacagaaaacagagatggggcttaccccagaaacctcggactaaagtttttaaggaacttaagctgagtggtcttaaaactgcagttcatgatgttgagttggacatggagaaacatgtcaacagattgggagaatgtagttctgatatcagttcatgcccaatgaatgaagatagttctcctcctgataccaagaagtacagtcggggtagatacatattgcagtttgataaat

SEQ ID NO: 91021 - DNA, 67 bp, Glycine max
  Clone ID: 700904026H1
tgcctttgcataatgatgtccatattcctgctattctccttgctcgactcattctcgcaagtgttgg

SEQ ID NO: 91022 - DNA, 248 bp, Glycine max
  Clone ID: 700904027H1
gtcgcgcttttcagagctgagactgactcagaacaacttgcaatattgggaatagcatttacgatattggatgaactgttaccaaatgctgtgttatcaaggtggatgctgcaaagtgaaagcaaggccaaggaaccaaatagtggagcaacagagaatgtaaccttcaatacaaatgctagtgtagaattgaaggagtggaggaaacatcttcagcattcttttgacaaacttcgggatcacttctg

SEQ ID NO: 91023 - DNA, 131 bp, Glycine max
  Clone ID: 700904029H1
actctcatattcttcaggagtctactgctagctcgattaatgagtatcccgaggcaggatgggaggctgctataaatcctcgtttctccaattatacagttgatcaatttaagcgccttcttggagtcaaa

SEQ ID NO: 91024 - DNA, 243 bp, Glycine max
  Clone ID: 700904030H1
cacagttatactctctctctctttgtcgcttggatcacagatctcatctcaattttcagctatgtcgacatttgataagccagaagtggtggaaatgggtagcaaggatgacaaacacaaggaagatgatcaagaggaggggaagggtggattcatttagaaggtgaaggatttcattcatgacattggtgagaagattgaggaagctattgggtttgggaagccaactgctgacgttactgc

SEQ ID NO: 91025 - DNA, 242 bp, Glycine max
  Clone ID: 700904031H1
caattacaacacaatcagtctgtgattcgccaccgaaaaacctctcaccatggtttctcgccatttggtttcgctcttcctctgtttcctctgtttcgagatctctgtttcatcaattcgattgcccggtttggaccaagacgccaaggccacgcatggatcggtgcttaggttgaacagaggaggctcttcagtgaagtttgatcccacacgggtcactcagctctcgtggagtcccaggg

SEQ ID NO: 91026 - DNA, 252 bp, Glycine max
  Clone ID: 700904033H1
cccttcctttcaatttttttcctacctacctaccaatcaacacctcgctggttcttgcagtggcgttacacatggatcggattccgatctacacgccgatggtgctaatcggaggattcgaagcctggtgccacggatctacctactgtacagaggtgtggcgatcgtgttcgtgttgctcttaaggtcgctttcggaagatcgtttgttcaacgatcggagattgcagcacagatcgagtgaagaaagcgt

SEQ ID NO: 91027 - DNA, 251 bp, Glycine max
  Clone ID: 700904034H1
gattggtgctgatcgtaccgcatctatagaaacagtaatgaaccatttgcaagaaactgcacttaatcatgttaaaagttctgggcttcttggtgatggctttggttccacgccagaaatgtgccacaaagaacttgatatgggtggttactcggatgcaggttgtggtggaacgctatcctacatggggtgacatagttcaagtggacacttgggtttctggatcagggaagaatggtatgcgccgtgat

SEQ ID NO: 91028 - DNA, 254 bp, Glycine max
  Clone ID: 700904035H1
tgcataatgggcaccaccaagagataaaaaaaaaatgattaaaagctaaggcagggagcaaagcacactgcaagattctacttcttcttcgtgtttcgaaagcgaaggggaaaaaaatacatagcatcaatcatataattagaagtcgaagaagtagcaagatcaattaggtatttagggtcaccaaagcacgatcagcgaaattttcaaggtcaactctcttttccttcttcccattttgcccttaatttttc

SEQ ID NO: 91029 - DNA, 236 bp, Glycine max
  unsure (1)..(236): unsure at all n locations
  Clone ID: 700904036H1
ctttctcctaaaacatctccagtgggttcttctgcttccataagacatacgacacgcangancatnancatggacatggccatgatcctgctcctcttcacggtcttcgccgtgtcatcggccctagacacgtagatcatcccgtacgacaacgcccacgtcgtcacgtcgctcagagacggcagcttaactccatgtactatcagtggctagggtagcacagcaacgaggacaac

SEQ ID NO: 91030 - DNA, 252 bp, Glycine max
  Clone ID: 700904038H1
ggcacggtaagatgcagaccattgctaggcgtttagggcagcaatcgctgaggccatcgacgtcgctcaagtccatctatccaatttccgatcaccattatggaatggatcacgagcgttacgtttctaccctcgccaccaagggagttggtcacctcgttcgtaagggcactggtggacgatcctccgtcagtggcattattgctacagtatttggggcaactggattcttaggtcgttatgttgtccaac

SEQ ID NO: 91031 - DNA, 252 bp, Glycine max
  Clone ID: 700904039H1
ctgcaaaaggagggatgaggaggaagcatcatcgtgcatggcgtcttgttgaggtgattaaattggtggaagcggtgtcacggtgtggagcagggaggtggtccgaaatcaaacggctctcctttgcatcatactcatatcgtacctctgttgatcttaaggacaagtggaggaacttgctcaaagctagctttgcactgacacctgcacctgcagatgaggggataaatttgcggaagcatggtacggctc

SEQ ID NO: 91032 - DNA, 81 bp, Glycine max
  Clone ID: 700904040H1
tctcaattcgcctcgagagtaatcactcattctcccaccccaaacactctctcaaccggcccatttacacttaacgcccag

SEQ ID NO: 91033 - DNA, 224 bp, Glycine max
  Clone ID: 700904042H1
ggtaactggaattcagaaccacagtgaaaacccgaatgaagatgggagtgaacgtataaatagcactactgccagaagtgctgaaagctggacagaatctgagattgcaaggcttcaacagttgagagctgagatggagacaaggtatatgcaaagtgggtgttcagaagaggttatgtcggagggaatagctacccaaaatggcttgttttggttacgaaagg

SEQ ID NO: 91034 - DNA, 248 bp, Glycine max
  Clone ID: 700904043H1
gtttcccaaggaaagaaagaattagaataggaccgacgatggttagtgttgtacgtgttcccccgaaacaaaaacacatttgttgtcacatcaaaatacttaaacaagggggtcctcgaccaagagaccccgccaacccggaaattatttccggacgggtacttgggggcataacagcttcccccaaattgagtcgaattaccccttgggctactcatggccatggcggtttccggggtcaagttttc

SEQ ID NO: 91035 - DNA, 249 bp, Glycine max
  unsure (1)..(249): unsure at all n locations
  Clone ID: 700904044H1
ggcggcgtttctgtgaacctcggaggactcaacgagagacacgatntgtgcggttgcttgcgggtcaaggcaaacgcacaagcccctccgaagaccatccagaaggttgagaatgatttgccatggttgccgtcgtcgtcgatttcgcacgccccgaggacttttataaatcagttacctgactggagcatgcttctggccgccatcaccaccgtgttcctcgcggcggagaagcagtggatgatgctg

SEQ ID NO: 91036 - DNA, 249 bp, Glycine max
  unsure (1)..(249): unsure at all n locations
  Clone ID: 700904045H1
cgaaatatggcttcaactcatctgctatacctagcaacgttcttcttacttctctccgcttcttatctccagtccgctggggcgttnaganaaccgttgactagtctcaagcttaactctcatattcttcaggagtctactgctaaagagattaatgaaaatcccgaggcaggatgggaggctgctataaatcctcgtttctccaattatacagttgaacaatttaagcgccttcttggagtcaaacca

SEQ ID NO: 91037 - DNA, 251 bp, Glycine max
  Clone ID: 700904046H1
cactactcacaactcacagcacaaaccgtaacataaccaaactttgagaacccaacggcttaaccatctccttctctccctcttcctcttcgcagccgcattctccagcctccacccgacggccaccgccggagacgcaggggcaccgtctgcaggcgacggcgaccgcgacgccgatttcatccgcactagctgcaacaccacgctctacccggaagtgtgtttcacctccctctctcgctacgccaatg

SEQ ID NO: 91038 - DNA, 246 bp, Glycine max
  Clone ID: 700904047H1
gtttttgaaatgttgtcaccccttcttctatttctatgcctaactcttcctttgtttttgtcgcccttcttcaaataccgtaaaaccttcattaatccaccacttccaccaggtcctagagcccttcccataatagggcatcttcatcaactagatagtccttctcttcatgagcagctatggcatctctcaaaggaatatgggcctttattttcccttcattctggattaaggccagccatagtt

SEQ ID NO: 91039 - DNA, 203 bp, Glycine max
  Clone ID: 700904049H1
gcaagtgcaaggcatagatgcactagttgtcccagacaaaaataagtgtcccatgatatcagatacgccaagatcagtgtcactcacttatactgagcgagccctcatataatcagtggccgcggccatctcaaatatatgggcagaaaatcagatcctgggatccaggaccattgtctgcacgtcattcacagacactgagg

SEQ ID NO: 91040 - DNA, 237 bp, Glycine max
  Clone ID: 700904050H1
gtttctttcttcaacgtttccatcatacacagatcccaatcctctctcaagccctaatttcccctcatttccatcgccatacggagaggtagcccctctggtgcaggctcggctgaatgttgtggtgttggatagttctccagggaactcaatttatcagttggcgatggtgaactatgtgaagagggtgtaccctgagcttgatgtgattggggggaatgttgtgactatgtacca

SEQ ID NO: 91041 - DNA, 251 bp, Glycine max
  Clone ID: 700904051H1
tacagtttgtattattgtagcagagagatggagagtgatggcgttgaggatgtgcaggtacgtgatggttgcttcgttgcttttcctattggagttcactgcgacagttatagatgcgcgcttacgagtcaagttcattgatccctcatttacgccccaattctgacgccaccgagtacgatgttaattcgacatcaatagcgtgctgtcatagctgtccttgctcgtgatcaatctcttcagggtggcgt

SEQ ID NO: 91042 - DNA, 251 bp, Glycine max
  unsure (1)..(251): unsure at all n locations
  Clone ID: 700904054H1
tgttgatcgagataactagaaacagtgtgatgaaaatgaaggtccttgttttcttcgttgctacaaatgtggtagnctggcaatgccatgcgtacgatatgttccctctccgaatgaacactggctatggtgcccgtactccggaggtgaaatgcgcaagttggaggcttgctgtggaagcacacaacatctgtggctttgagaccattcctgaagagtgcgttgaagcaacaaaggaatacatccatggc

SEQ ID NO: 91043 - DNA, 162 bp, Glycine max
  Clone ID: 700904055H1
tatcaggcgagaaaaggtcaccatcgacaggccgtcggcgggggctgcgcagctgacgacggtggtgacttcgaccactctccaaacctggatctatgcgaacttggaaagcgctaattagaaagccgcttcgtctatgagcatgagaagggtcgacccagt

SEQ ID NO: 91044 - DNA, 147 bp, Glycine max
  Clone ID: 700904057H1
tcaaaagtatatattttatgtttcagtaacaacactaccaaaaaaaggcaaaatggatctgcaaaatgtgcaaaaccatagcatgatgcgtttggttctgtccactgatgccaagcctaggctgaaatggactcctgagcttcacca

SEQ ID NO: 91045 - DNA, 251 bp, Glycine max
  Clone ID: 700904059H1
cactaagacctgaataggggatcgagaagcaaggaatctattctttaaacaggcatgccttcttttaatcatctccttctgcaccatctatcacctcctccttctctttcaaaaccatggaagatttgaacacgattggcgctgattgtgtggtcatatcatgctgctgccagtgcttgatgcttcaaattcttgtatttgtgttgctgaagcttcccgggaagttgataaggaaaacaagagaatatgct

SEQ ID NO: 91046 - DNA, 244 bp, Glycine max
  unsure (1)..(244): unsure at all n locations
  Clone ID: 700904060H1
ccctccccaaaaaaaacaagctganananaaattaatcaaatactacttcgtgtgggggctagaaaatgggnnantctgaggaaaacagtgatgttgctgccaggcagaaggcaatcgatgattggcttcctgtcactggttcccgaaatgccaaatggtggtcttcagccttccacaatctcacagctctagnaggtgcaggtgtcctcagccttccatttgccatgtcaaatatgggctggg

SEQ ID NO: 91047 - DNA, 228 bp, Glycine max
  Clone ID: 700904061H1
gtgaacctccatagcgtggagccagggtacgtgaaccagggttatcctctgcagccacctctaccgtactacatgcacccgcacgcacctccgccacagatgttcagcgatgagaaccccaatgcttgttccatcatgtgataatcagtgattaattttcgttttcggtgtactcttacacacggacggaatacgggatacggaatatgcacgcacgttgtaatttgt

SEQ ID NO: 91048 - DNA, 248 bp, Glycine max
  Clone ID: 700904063H1
caaacttgcaacttctccccacctaatctatcattcatccacctccttctcctcttccattcccatgtagctttgattctttctctctaacatgggtctgaactacagaaatttgttcccaggaacaccatcaaactgtctacaagactgttcttatgatgataaatcatcatgttgtgatccttctaatttgctccctccaactcctcctatctactcagataatgatttgagccaaagtcccagca

SEQ ID NO: 91049 - DNA, 249 bp, Glycine max
  Clone ID: 700904065H1
attcgaggcgaatcggctcgtggattataattcatatcaaatccttaactattgtgtcaagtgtcaaaccatattctcatacactatttttgtcatgcttaaatatatccctaagttaataattgtgtcaagagtgacccaatagcatatgctcccagttccttgttgattccttgaacgcccgccaatgtaaaagagaatatccagtgctggagtccccttgcatgtgtcttagattcctctctttgc

SEQ ID NO: 91050 - DNA, 244 bp, Glycine max
  Clone ID: 700904067H1
ggttcctctcaggagtctgtttctaaatcaggtagtgaaaatgaaacatcaacaaccatgcaatgtaacaaatccaacaaaaagctctaagtagtcaatggtcccagctctcacttcggacattcttccagatcagtgcaaatcttgacaatggtaggtctgtagaagtagtcgatgactcatgtactgagtactcagataatcaggcagaaccctctcaaccaagccctcgtttacagggaac

SEQ ID NO: 91051 - DNA, 248 bp, Glycine max
  Clone ID: 700904068H1
tgttgatgctgtcatcaaaagtggtcctcgtgcagatgcaataagaaataccgcacgctcgaattgtaaggaggcaggctgtggatatttcaccccttcggcgtgtgaatcaggtcatatatcttctaacaactggtgcacgcgaagctgctttcagaaatattaagacaattgctgaatgcttggctgatgaacttattaatgcagcaaaagggtcgtccaacagctatgctatcaagataaaggat

SEQ ID NO: 91052 - DNA, 248 bp, Glycine max
  Clone ID: 700904069H1
ctagaaacagtgtgatgcaaatgaaggtccttgttttcttcgttactacaattttggtagcatgtcaatgccatgcgtacgatatgttccctctccgaatgaacactggctatggtgcccgtactccggaggtgaaatgcgcaagttggaggcttgctgtggcagcacacaacatctttggctttgagaccattcctgaagagtgcgttgaagcaacaaaggaatacatccatggcgaacaatataga

SEQ ID NO: 91053 - DNA, 251 bp, Glycine max
  Clone ID: 700904070H1
catgcttggctggggacgcgagaaccatggaagaagctgctggcatggcggtctcatccgcatcctgtggctggcatggccagttaagctgtgcgcattatggccagaagtgtgatcggtgagcatgaggaagactcgtcacagggcacgtgtcatcaggaagcccatggtacggtcgaaaccgagtcaagtacttgggctcattctctggcgaccccgggtactatgtaaccggtgagttcggatgtgac

SEQ ID NO: 91054 - DNA, 247 bp, Glycine max
  Clone ID: 700904071H1
tttcggattataccataattttctgcagactctgatggaagctgttaattttacaggcaatggatgcgatatagaagttgtattcaagtctccccatagatgacatacaaagattggagctagaagtatctaacacatgctaattgcagctgataagataactgtgatccatagcttagggtgtctgatttctgatatgaccttcttacaggatgatgatttgacaaatgtatgtatccagagtgcg

SEQ ID NO: 91055 - DNA, 248 bp, Glycine max
  unsure (1)..(248): unsure at all n locations
  Clone ID: 700904072H1
aataatcactcattctcccaaatcaattccactctcaaccggctttctntagcataagcccagcatggccaccgcaacagcagcagccacctcgtccttcatggggaccctcctcctagaggcccactccggggcagggcgggtgcaggcccggttcgagtttggcaagaagaaagccgccgccccgaacaaagtttccagggggtcgggctctagctccgataggcccctgtggtatccgggcgcca

SEQ ID NO: 91056 - DNA, 234 bp, Glycine max
  unsure (1)..(234): unsure at all n locations
  Clone ID: 700904074H1
acaaccacagtgacaaccgngtacaatgggagcganatagtagatagcactactgacataggtgctgcgcgctggacagaatctgagattgcaaggcttcaacagttgagagctgagatggacacaaggtatatgcaaagtgactcttcagaagaggttaactcggaggaaatagctaccaaaatggcttgttttggctacgaaaggcatgctgtggtcttcaaagagaaatgg

SEQ ID NO: 91057 - DNA, 268 bp, Glycine max
  Clone ID: 700904075H1
tcggtattcggctcgatggcaccttggcagcaggtatttgtactggatacgcggtcatttgtagtgctggagattcatcgactgaaccctatatctgttgacactacttattacttgctcatggatctgctgccatattatacaagacaaaatatcaggttcgtcagaaacggcaaattgggatcactaatccaatacactactttttgccaaaatctcaaagtgctgtcgattacaatgcagtaagcagagctctggacttcttctt

SEQ ID NO: 91058 - DNA, 268 bp, Glycine max
  Clone ID: 700904077H1
gctcggggttcggctcgagcgaaatatggcttcaactcatctgctttccctagcatcgctcttcttacttctctccgcttcttatctccagattcctggggcggaagcacaaccgttgactagtctcaagcttaactctcatattcttcaggagtctactgctaatgagattaatgaaaatcccgaggcaggatgggaggctgctataaatcctcgtttctccaattatacagttgaacaatttaagcgccttcttggagtcaaacca

SEQ ID NO: 91059 - DNA, 268 bp, Glycine max
  Clone ID: 700904078H1
actctgaattcggctcgcgcactactcacaactcacagcacaaaccgtaacagaaccataccatgagaacccaacggcttaacaatctccttcttcccctcttcctcttcgcagccgcattctccagcctccacccgacggccaccgccggagacgaaggcgcaccgtctgcaggcgacggcgaccgcgacgccgatttcatccgcactagctgcaacaccacgctctacccggaagtgtgtttcacctccctctctcgctacgccaa

SEQ ID NO: 91060 - DNA, 250 bp, Glycine max
  Clone ID: 700903283H1
catctttgtcagctttttcttgcttccgtagttcatatggcgtgtgttcaagtcatcacagtttttctctttgcattggctctagctaaaatttacccctcaacatgtcaagtggtgcagggaaaagtctcctgcgttgactgcactcacaactatgacttatctgatattaaggtttcggtgaggtgtgatggtgtgaaaaaactggctttggctactacagaaaatgatggctccttcaaggttgatc

SEQ ID NO: 91061 - DNA, 248 bp, Glycine max
  Clone ID: 700903285H1
aagtcttcttgatccttctttttctccttgaactcaaacatggcagatgaggtggttctgctagatttctggccaagtccatttgggatgagggtcaggattgcacttgctgaaaagggtatcaaatatgagtacaaagaagaggacttgaggaacaagagtcctcttctcctccaaatgaacccggttcacaagaagattccggttctcatccacaatggcaaacccatttgtgaatccctcattgc

SEQ ID NO: 91062 - DNA, 203 bp, Glycine max
  unsure (1)..(203): unsure at all n locations
  Clone ID: 700903286H1
cttccattccatcgcattgtatggtccccttttcatacacaacacaacacattccctccacacaacatatgatatacncncacncncancaccancaccaacaccaaccgcttcccctctcccgggttcggatctacgaccaccgccgcacgcggcccgagcttccacactcagaatccagatccctacttccacacaacata

SEQ ID NO: 91063 - DNA, 248 bp, Glycine max
  Clone ID: 700903287H1
agcagatagaaaaaagagctgagttttgagttcaaaagatgactaacttcccagtgatcaacttggagaagctcaatggtgaggagagaaacgacaccatggagaaaataaaggatgcttgtgaaaactggggattctttgagctggtgaatcatggcataccccatgacttattggacactgtggagaggttgaccaaagagcactacaggaaatgcatggaagagaggttcaaggaatttatggca

SEQ ID NO: 91064 - DNA, 220 bp, Glycine max
  unsure (1)..(220): unsure at all n locations
  Clone ID: 700903288H1
catgcgcttatnaagatggaggggaaggagcaggatgtgtcgttgggagcgaacaagttccccgagatacagccgattgggacggcggcgcagatccaagacgacggcaaggactaccaggagccggcgccggcgccgctggttgacccgacggagtttacgtcatggtcgttttacatagcagggatagcagagtttgtggccacttttctgtttctct

SEQ ID NO: 91065 - DNA, 246 bp, Glycine max
  Clone ID: 700903290H1
gttatttttagagctagtataagcttgtaacctattatgactttgatgaagagcaacgcataaccaatggccactgaatttttttccttatcttccagtgctgcctttactcttaggccttggccaaaagaatgagagagatcatcatcaattgacatggaatcatgtgtgcctccaggatttagatttcatcccacagaagatgcgattatcgggtattacctcaagaggaagataaactcgcta

SEQ ID NO: 91066 - DNA, 248 bp, Glycine max
  Clone ID: 700903291H1
cgaagaagaggaagaatcagagctcagcgataagcagaaagtggagatcgcgaaatggttcctcctcaactctcctcccggagaaatccaatacgttgccaaagatgtgaaatcgattctcaacaacgacgatttgtacaaggaagccgcttccgaggcttttccctattacaacaaatcgcacttgatttccattccaatgcccaaccgaagcggagacgtactggttacttcgttcggtgagcttg

SEQ ID NO: 91067 - DNA, 244 bp, Glycine max
  Clone ID: 700903293H1
caatcttctctatcgagaatggcgtgtggttctatgtgatctagatgccactgccattggagttctttctataatcctctgcgtgttgtttgtgtataatcccgtgatatttgcattaggtagaaaagaggctcccaaatttgcaggttcatggcccatacttggtcacctacgactattgagtggtgtagagacacctgatagggtgtgtggtgctttggcttataagtatggagccatattc

SEQ ID NO: 91068 - DNA, 247 bp, Glycine max
  Clone ID: 700903294H1
cttgctttcacttcaccaccaccttctcctatctccttcttcctcctcctttctgcttcttcattctctccttccctcttgagcttttctttttagcacggaacatgtgagtgccacaaagggtttgagactttttgaggctttctctcactctaataagtcctaacctcattcacctcttgggtggtgtggtctataatgtaatttatcatttgtgcaaattttttctcagatctatccaacttct

SEQ ID NO: 91069 - DNA, 246 bp, Glycine max
  Clone ID: 700903295H1
cgcaacaaaaagaaagaatcccaggcgaggagaaagatggaggggaaggagcaggatgtgtcgttgggagcgaacaagttccccgagagacagccgattgggacggcggcgcagagccaagacgacggcaaggactaccaggagccggcgccggcgccgctggttgacccgacggagtttacgtcatggtcgttttacagagcagggatagcagagtttgtggccacttttctgtttctctacatc

SEQ ID NO: 91070 - DNA, 139 bp, Glycine max
  unsure (1)..(139): unsure at all n locations
  Clone ID: 700903296H1
ctgaatttctgaattctctgctgctgaaaaatgaaactgtatccaagggagatcgtgaaactagacctgcataatgcaggctaccttccacacaacatacgagtttacgagatngggatcaactaggacgaaactgagg

SEQ ID NO: 91071 - DNA, 185 bp, Glycine max
  Clone ID: 700903310H1
ttcacaccattctcacaaaacaactttcaaactctgagaaagaatggctgccaacacattgatgagtactgctatctcagccttcccatctctcctttcttcctcaaaatccagatttgccaccgcagttcctctttctagctttggtgtcaccaatgcctcttcttctcgcttttctatgagtg

SEQ ID NO: 91072 - DNA, 186 bp, Glycine max
  Clone ID: 700903311H1
ctagttataaaataattaatttaataaaggatataattaatttaataaaggatccctcttttttgacacgaaatggatatatccataccatatatcttggatttatttttatgaaataattaaatatggcaaaacctatatctaaaaagggttcgcgtaaaaatgtacgtattggttcgcgtaaca

SEQ ID NO: 91073 - DNA, 186 bp, Glycine max
  Clone ID: 700903313H1
ctgattctgagacagaagaaggaagaaccaataacagaggaatccaagttcctttctagggaccgcgattcctcattcattcattcatatgcttcttcaactttctcctctcttctccctctaactctggcgcattatatctagctagcactcttggtccaaggaaatagagcgaatgttccactg

SEQ ID NO: 91074 - DNA, 185 bp, Glycine max
  Clone ID: 700903314H1
agaaaaacaaacacttatctctgtttctccgtcttacggcaattgatggaagcactatctctgcaacttccgtcacattcacatggcagcaacatcagggaagattgtccaatttttttttgtgtcaaactgccaccaacagaatacacagggtcgaagggactattgttttgccccttctcggc

SEQ ID NO: 91075 - DNA, 188 bp, Glycine max
  Clone ID: 700903315H1
cctccttactactatcaaagtcctcctccaccatctcccactcctcatcctccctactactacaaatcccctccaccaccaacgtcgcatcctccaccttaccactatgtgagccctccaccaccttctccatctcctcctccaccataccattacacatcaccatctcctccttccccagctcccgc

SEQ ID NO: 91076 - DNA, 193 bp, Glycine max
  Clone ID: 700903318H1
gctcgaagtcatcatcatcatccaccttcgttagatatccccctcaacatttgtggtggtactctccatcccaattatcgccaactcctctttcttcaaatttcaatctcagaggatgggtggtgaggaattgtgtttgatggagaactcagggaaagggaagaggctgtggaagaaggtgaagtaccaactg

SEQ ID NO: 91077 - DNA, 187 bp, Glycine max
  Clone ID: 700903319H1
aagctatcctagttccaagctgtttattaccttgcatcttccgcaatcaccttctctcttcactcttatctctttctctctaaaaatgtgactttgttgtacgtgtgatagtgagcctaatacagtacggatacttgatcaaaggaacaaatattgaagtgtccaatgcgtaccaacaatacccttt

SEQ ID NO: 91078 - DNA, 186 bp, Glycine max
  Clone ID: 700903320H1
ataaaatcgtgtcttctcctctgtactgagacatggccgaagaagaagaagaagaagaatcagagctcagcgataagcagaaagtggaaatcgcgaaatggttcctccacaattctcctccaagagaaatccaatacgttgccaaagatgtgaaatccattctcaacaacgacgatttgtacaagg

SEQ ID NO: 91079 - DNA, 129 bp, Glycine max
  Clone ID: 700903322H1
gaagagaggtataggaggaagagaaagtggaaggactacttcaggaggctcactaggaaggtcttgttgaagcaagaggagatgcaaaagaagttcttggaagccatggaccaaagggagaggaaaagg

SEQ ID NO: 91080 - DNA, 186 bp, Glycine max
  Clone ID: 700903323H1
tagagagtgagtgccccaagtttattgcttgggccaagaggtgccttcagaaagaaagcgttgccaagtctcttcctgatcagcaaaaggtttatgagttcattatggatctaagaaagaagttaggcattgagtaggttggagcttaatggccattgtgaagtagtggttttccattggtcgttc

SEQ ID NO: 91081 - DNA, 186 bp, Glycine max
  Clone ID: 700903326H1
ctctccttctagaaacttcgcttctttcactccctgcacttcttccttcttcgccacagctcgttccctcctctgctccgttccgcggtggagccaccgcctccattccgcctctccgctcactccccgtcctcggatcagcgccgtcgccaccatggccaattagagaacacacacaaaactcag

SEQ ID NO: 91082 - DNA, 184 bp, Glycine max
  Clone ID: 700903328H1
aaagaacttatctcaggagcaaccaaatcagtttatgcccctgaaccttttgatgttggacgcatattacaagttgatattatttcagaaaacgagcacatcacactttcaattgctggtccaatagatccagctgctggtttgggaacgtaagtagaggcactaatgcgcaaacatgacactg

SEQ ID NO: 91083 - DNA, 186 bp, Glycine max
  Clone ID: 700903329H1
ctccatctttctcacacttttctcccacatcacaatctcatcattatcttgcattaatacaatggaccaaacaaccgccgctgccaacgaggttgtccgcgagttccccggcctcctccgcgtctacaaagacggccgcgtcgagcgcctcctcggcaccgaaaccacccctcccggcaccgaccc

SEQ ID NO: 91084 - DNA, 184 bp, Glycine max
  Clone ID: 700903335H1
tcccaccctattattccatgccttcttctcacgcaaaaaaggccttataaatcccacactacaccctgtctaaagccctcctctacactgttccctttcaccattccattttctaacttttctgactctgctcatggcttttcttttcttagcatcacctattctcttggtatcatagttattt

SEQ ID NO: 91085 - DNA, 181 bp, Glycine max
  Clone ID: 700903338H1
acttcctcagctgcaacagtcgtagcaacaggtccagcagcagcagcttgcgcagtgcaacagcagcagcttccgcaaatccagcaacagcagcagctacctcaacttcaacaactcccacaactacagcaacagcagcagcttccgcagttacagcaactgcagccgcagcagcaacaga

SEQ ID NO: 91086 - DNA, 182 bp, Glycine max
  Clone ID: 700903339H1
ctcactgaaaaaaaatagcttgttctcaccatcctattttttcaactcatatatacaaatatatataacttggcttctaccttctctcgaagcctagcacttgtaagcttttacattgtcgtttgtgctgccggtaacttgaaccaagactttcagcttacgtggggagatggtcgtgctaa

SEQ ID NO: 91087 - DNA, 182 bp, Glycine max
  Clone ID: 700903340H1
gcttctcactgatctccattcccattccatggcttccactgaatcatcccctttcaagaaaattcagattcaaagggatgacactacatttgacgcatatgtggttggaaaagaggatgctcctggaattgttgtgattcaggagtggcggggtgtggattacgaaattaagaaccatgccg

SEQ ID NO: 91088 - DNA, 87 bp, Glycine max
  Clone ID: 700903344H1
ggcatgcaagaagagagaggaatcgtactacacaagtgtcatacttcccctcattttgttactgcatttgggactcttcactctgct

SEQ ID NO: 91089 - DNA, 124 bp, Glycine max
  Clone ID: 700903347H1
ggggaagatagaaagaaacaaaaacaccttattgacaccaccttttctatcatccttcaagtcatcatctttgatgatgcccatcctcctggtcattctcttggcgttgtcttctccttcatta

SEQ ID NO: 91090 - DNA, 182 bp, Glycine max
  Clone ID: 700903350H1
gaaaagccttccactattccatatatatcagcccataaagaatgaagaatactgcgttgttcactatctttctactccttgctttcacctcatacctaccttcagccaccgctgctagtgtgtacgatacggatggtaatattcttcaatagggtcgcacatattttgtgttggcagctaca

SEQ ID NO: 91091 - DNA, 101 bp, Glycine max
  Clone ID: 700903352H1
cttcttgtttggtgccttctgttctggagctagcaaaacaacccatcatcgaagttccagaacgatatgttcatgccaatcaagatccacatattctttcc

SEQ ID NO: 91092 - DNA, 181 bp, Glycine max
  Clone ID: 700903353H1
gcggaatcagctagaattttctaataatggccaaagacgttgagcaggttacagagcaaggtgaatactccgcgaaggattaccatgacccacctccggcgccgttgatcgacccagatgagctcactaagtggtccttgtacagagccgccatagctgagttcatagcaacactcctttt

SEQ ID NO: 91093 - DNA, 174 bp, Glycine max
  Clone ID: 700903359H1
ttcctctcgcccagaatccgagatcaaccctgacccctaaggccaggggtttttctcggcttcttcagattcctgaaatggcgtctgtttcagctttagcccagtacaagctcgtcttcttgggtgaccaatccgtgggcaaaaccagcatcatcactcgcttcatgtacgata

SEQ ID NO: 91094 - DNA, 182 bp, Glycine max
  Clone ID: 700903360H1
gcggaatcagctagaattttctaataatggccaaagacgttgagcaggttacagagcaaggtgaatactccgcgaaggattaccatgacccacctccggcgccgttgatcgacccagatgagctcactaagtggtccttgtacagagccgccatagctgagttcatagcaacactccttttc

SEQ ID NO: 91095 - DNA, 87 bp, Glycine max
  Clone ID: 700903362H1
tgtgagtatgagaaaaggcttcctgcaccgagcacaccaacttgagacctctgattctttctttgcttagaattccacacaacatac

SEQ ID NO: 91096 - DNA, 182 bp, Glycine max
  Clone ID: 700903363H1
ataaaattcttccaccaagttatgggtttccttgtgttgcttcttttctccctcttaggtctctcttctagttccagcatatcaactcatcgttccatattggaccttgacctaaccaagtttaccacacagaaacaggtgtcttcactgttccaactatggaagagtgagcatggacgtgt

SEQ ID NO: 91097 - DNA, 180 bp, Glycine max
  Clone ID: 700903366H1
ggcatattgtgccctccctctttctagctatttccctctcttaacacaattaacaaagatatatcatatgctatcaactccaaatgatgaaaaatattgggttgtttcttcttgtggtggtggctacttttgtggtggcagccacagctggtagcttttaccaagactttgaaataacat

SEQ ID NO: 91098 - DNA, 180 bp, Glycine max
  Clone ID: 700903367H1
gtttttatcatggaactgattggattgaggttactggaattccttgctttcctggcgtgcccaaatcaccataggcacaaaaagacaatacttaattggcaataaaagtaatgagttgcaaaatcaagcaatataaattaattaaaaagtaatgattgtcgctctgtattctttaattat

SEQ ID NO: 91099 - DNA, 177 bp, Glycine max
  unsure (1)..(177): unsure at all n locations
  Clone ID: 700903368H1
aacaataatggccaccacctcggagagggatatggagaacaagagtgatcaagaagaactgaagcatcttgggtttgtgaagattgcggcgattaaagcctttgtgtgtgttgcnaatctctacgacttcgcaaagcaaaactcgggacctttgagatctgctgttggaaccgtgga

SEQ ID NO: 91100 - DNA, 177 bp, Glycine max
  Clone ID: 700903374H1
cagcttttccctcgttgaaatgaaaatgggttcttctttgtggactttgtgtctaattttggcttcactagcctcttctgcattctgtgcctttccacggaggccagtggatgttccattcggcagaaactacgttcccacttgggcttttgatcacatcaaatacttcaatggagg

SEQ ID NO: 91101 - DNA, 177 bp, Glycine max
  Clone ID: 700903375H1
cttctacaagttcctcaagaaacatgcatcaatcccattcaagctccagaaaccatgctcaacttctgaatccgattccaaggggagctctgatgccaattagagccagagtagtgatgtgaaggacgaattatgaggagttaagtgatatatttttatttatagaaactatgattc

SEQ ID NO: 91102 - DNA, 178 bp, Glycine max
  Clone ID: 700903379H1
gcgggaaacaagataagtgatgttgaggggctacacaggttattaaagctaacagttctggacttgagctttaacaagatttcaacaacaaaagcattgggccagctggtggctaactacaactcacttcaggccctgaatctgcttggaaatccatgtcaaagcaacatcagtgatg

SEQ ID NO: 91103 - DNA, 180 bp, Glycine max
  Clone ID: 700903383H1
tgcgttggatgagaattcaaaaatcgtgaaggtggagttcttttatgatcctgccgaattgcttggaggtctcctgaaaggtcccaagtttgatggcagtgctgaagatgctgttgcaagctgtcctgtactcaggaacaccggctagagcagcacaagttcaaaaagtttaacctttga

SEQ ID NO: 91104 - DNA, 178 bp, Glycine max
  Clone ID: 700903384H1
gagggttgaaaggggttggtgaggaggatgtggagattgtactagacaaaagaggaattcaaggcattctgaaatgtcttgtcgttgttaaatgacatagtaataaccctgtaatatttatccttcaaatccaagagacgttgaacaaaatccacaggatctctcaacctttcaggat

SEQ ID NO: 91105 - DNA, 177 bp, Glycine max
  Clone ID: 700903387H1
gtcgatgtttacattgccaagggtgctggcatcacggtgcagtttgtgaagaacatcatcatccatgggatcaaggtctttgacatcgtgattcgtgagggtgggacaatcagagattctgagacacattatggtttcaggactaagagtgatggtgatggcatttccatctttggt

SEQ ID NO: 91106 - DNA, 178 bp, Glycine max
  Clone ID: 700903388H1
acgaaaagagagataaagttaaagaaattaaataccaccaatttcgcccacgaaagcctctctctcgttcgttgcttcaaacttcaaacttcaaactcctccgcggcttcccttctcgttcttcttcacagaaatggagttttcagtggccaaagcgttgaaaccgagtttaaggagt

SEQ ID NO: 91107 - DNA, 172 bp, Glycine max
  Clone ID: 700903391H1
agattctggtgttcagcaatctgatgaacagaagatggagcaggaggtggaaggggatttgctggatgctggtgaccagcagccacctgatgatcaggatgagcatcatggtggggattcatcagattctggttctcttttgccccgaatgaatcgggacagctcaatcgct

SEQ ID NO: 91108 - DNA, 177 bp, Glycine max
  Clone ID: 700903392H1
tttccatttacaatggtttgttcctatccttttagctgccccattaaattgggggctatcaagacttgttcttttttctcctacatttaatctttacaacaggaaatgctcctgaaaattttggcttcattgatgcacaagcattggtagctgttggatgtgtagaaaaataaatcc

SEQ ID NO: 91109 - DNA, 176 bp, Glycine max
  Clone ID: 700903394H1
gcaaaactgaaagcaaaggctaactcggagtgcaacacaaccaaaatctcatcgttccaatcattatcggcacttgtttggagatgagtaactcgtgcgcggcgcttgccgtatgatcaaagaacaagttgcaagttgtccgcaaacaacagaacaagaatggaaccaccactgcc

SEQ ID NO: 91110 - DNA, 176 bp, Glycine max
  Clone ID: 700903395H1
agatcccattgccataaattactttgtccacaatcttgatttcacgctcagcctcgcgtcacctaacaattttgaagcatttggggttgcaattgaattcttctgagcaaaccttgttcttatcgtcgccacaatagacatggtttatcattctagttttgtgaatgaagatggag

SEQ ID NO: 91111 - DNA, 269 bp, Glycine max
  Clone ID: 700903401H1
catgaagggatgatgtgacgtgttgcccgtctaccacgtggagggttttgattggatgggagagtggattccaaaagaagggcgacctcctgctttggtttcagtggattcctcgaggcggagaatgtcagggcccattttaaatactttatcaagtgccaatgtcttgggtcagtcaagtggatcatctaggcgggctgctgtttctagtagccgtgatgcatttgttggtgctgagtcagatattcggactcgcactgctgaggcta

SEQ ID NO: 91112 - DNA, 83 bp, Glycine max
  Clone ID: 700903402H1
agagaaagagactcaacctcgttcgtgtcgttcctccatgaaataatggcttccgtttctactttctgtttcgttctcttctt

SEQ ID NO: 91113 - DNA, 265 bp, Glycine max
  Clone ID: 700903403H1
ctcatttgtacaaatcagacaacttacgagaacttccgaaatcaatatgataagaaggggaacccattcaataggggatcatgcagaaatctgaaagaaacactttgttccagtattccccattcgaagaataatttccgatcatttgttgtggaggatgaacagatgatggttgggtctctgactccaaatactggggatggaattttgaccccaaaggagaaaattgatcttgaaatgggatctatgcgtgcagaagatggtc

SEQ ID NO: 91114 - DNA, 263 bp, Glycine max
  Clone ID: 700903404H1
ctctcacacactcaaccaacgacgaaggcagaagaagaattacaaagtaccaccaaacaggctgcgacgacgtcgttctttgcaacttccagttcttgttcttgatgaatatgacaccagtttgcccctttgtcaaagctgctcgccccgatgataacaatgcctctaagaaatctggcgaaaactctatgaaacatcaggctgagtctgagagtaaggtgaagaaagaggttaatgactcagctagtacctcaccaaagtgc

SEQ ID NO: 91115 - DNA, 78 bp, Glycine max
  Clone ID: 700903405H1
agatggggtctccaatggcctctcttactctcactattgcattaaccataatctctctcaccttgccatctcaaacat

SEQ ID NO: 91116 - DNA, 259 bp, Glycine max
  Clone ID: 700903411H1
tcccacttggtgttgttcagcttggctctctaaataaagtgattgaagatatggagtttgtaactcatatcagaaatctttttttgtctactcaaaattactcaatcctacgtcctagtcaaatacagggtagtttgaagagctcatctgagctggatacattgaaggaaaatttgtcttcagatattatgcctacttgcttttacgatacacagaaatctatgaaaagtgaaacagcagatgttttaatgccccttca

SEQ ID NO: 91117 - DNA, 258 bp, Glycine max
  Clone ID: 700903412H1
caccaattggccagaatacaggttgccatcatacttaagacctaattaccccgcaattcctgcaagttattaccgttacactccacctgcgaaaacaaccacaatcacatcttccaagccttgatggccacatgcatgcaatttggtatatacatattattgttatgattgttagcatttcaaataaatcggttcatcaatatggccatgcacaagcattcgatctctctccaagtttaattattactttgtggttta

SEQ ID NO: 91118 - DNA, 260 bp, Glycine max
  Clone ID: 700903414H1
ctgctagcacctgttatcatgaagggcaatagcaagacttctttgagccaccaggagaaccgaatactaggagagaccaaggatcaaattgaacagatacttacacttgtttttgagaattataaatcacttgatgagtcttctttctcgggcatcatagaggttttcagaccagcaacgggtcaagcagcaccagccttggaacctgctgttaaactctacaagcttcttcatgatatcttatctcctgaggctcaaat

SEQ ID NO: 91119 - DNA, 266 bp, Glycine max
  Clone ID: 700903415H1
ggagaaagcaacaagagtgaaaatacttgaagtttgccttgtgtcaccaccacaggaaaaaacgacaacacaaacatctttgtctctcacattctttgagttactatggctgaggcttcccccagttgagcgtcttttcttctatgaattccccaaccaaaccatttcattcttcgacaccattcttccaactctcaaacactctctttccctcacactccaacactttctaccttttgctggcaccatcatttggccccttgact

SEQ ID NO: 91120 - DNA, 261 bp, Glycine max
  Clone ID: 700903418H1
agaggacttgacaacacttcattcagatatctacatattgtaatagtgttcacagtataatctgtgacattaatttaaagcttgtgttagtataaatgaatgggtggtcattgttcatggttctgcatattcagagtcggtggctcgaaacagttttttttgtgaatattcaacagagatacataaggaaattacagaagttattatcttggaaatgaagcatacagaaaatgaatacagcattctacaggcattaatctt

SEQ ID NO: 91121 - DNA, 260 bp, Glycine max
  Clone ID: 700903419H1
ctttttcttttgtcttttattattatgctgctgttgttcgttcatgtgaacatggtggatgctgatagaagcagataatatagggtttatatacagattttttattagtacgtcccacacactgcccatgtttcagggataatcattctttggtgccaattttttttttttcataaaatcctctctgattctctctctctcttaattagtttctcttaggaatctcagatcttcatagccattgttccctctagcttcat

SEQ ID NO: 91122 - DNA, 257 bp, Glycine max
  Clone ID: 700903420H1
gtgcaataactcgttgtacagtcctagtgtgtgggagagacatggctaagatgtgtgttttggtgttggttcttgctctggctgtggccacaagtgccagaaacgttcccaaccccaaggatgctggtcttaaggaccagaagaacttcatcagctatggtggagttggtggttattccgggattgggaacaatggactgccttttggaggagctggtgccggaataggtggtggttttggcggaggtggtggactt

SEQ ID NO: 91123 - DNA, 122 bp, Glycine max
  Clone ID: 700903422H1
caatctggctccgtcaaccatggcatccttcgctgcccccaacaacattggcagcggcgtgctaccctctcgccagagaaaaccctctcgaccccctcccctcaaatgctcccttctccctt

SEQ ID NO: 91124 - DNA, 257 bp, Glycine max
  Clone ID: 700903426H1
atcgaaactcagaagtagaaagaaacacaaatcacaatcgctatggctaggtacgaccgagcaatcaccgtgttctcccctgacggccatctcttccaggtcgagtacgccctcgaagccgtccgcaagggcaacgccgccgtcggcgtccgcggcaccgacaatgttgtcctcggcgtcgagaagaaatccaccgccaaactccaagactccaggtcggtgaggaagatagtgaatctggacgaccacattgcgct

SEQ ID NO: 91125 - DNA, 257 bp, Glycine max
  Clone ID: 700903427H1
gacaaaggtagcgtgttgtacaaggggcaattttttcaaaacctttttctctctcgcaacctcacctcttcctccttcaatctctttcggaatttcccaaaatccttagtgggaggaagagatggttctgactcagaagcttcacgaagccttcaaaggcaccgtcgagaggattactggcccccgaaccgtttccgccttcaaagaaaaaggagttctcagtgtctctgagttcgtcaccgctggcgataatctcg

SEQ ID NO: 91126 - DNA, 88 bp, Glycine max
  Clone ID: 700903431H1
ctttcaataccattgtactacaatattgccctctaagtttttgcttcttaatccacaccctttcccacagcctttcattgtgctggtt

SEQ ID NO: 91127 - DNA, 264 bp, Glycine max
  Clone ID: 700903432H1
aaaacactcaattctcttctcttctcttctgggtttttgctttttcctcattctctcattctcaaacaccacaaaaaaatgggccttgtttcccaggatgccctcaaccaactccaagctctcatggatcaagtgctacttgaggaggagccactgcagagaacgtttcagaatgttcatcaaggatgtgtcaccgaaaccttaacacggtttctaaaagcaagggagtggaatgctaccaaggcccataaaatgatagtcgat

SEQ ID NO: 91128 - DNA, 261 bp, Glycine max
  Clone ID: 700903434H1
attgaatcgtaagcagcggctaccctaatcctctcctcttcctctctactaatttcagctatggccgacgaagctgtggttgttccagatcccacccagatcgatctcaagctctttaaccgctggagcttcgacgatattgaggtaccaatttccatgtttttagggttcagctgcttattaaattatatcctaaaaatctgtgatgtgtattctgttctgatgttttttcgatgtgttcttatgtgaaatgtgtaatta

SEQ ID NO: 91129 - DNA, 259 bp, Glycine max
  Clone ID: 700903435H1
ggtccacaaaccttgactggtacaagggtcctactctgctagatgcacttgaccagatctctgagcccaagaggccttctgacaagcccctcaggctaccccttcaggatgtgtacaagattggaggaattggaactgtgcctgtgggacgggttgagactggtgtcttgaagcctggaatggtggtgacttttgcaccaactggactgacaaccgaagttaagtctgtggaaatgcaccatgaagctctcacagaggc

SEQ ID NO: 91130 - DNA, 256 bp, Glycine max
  Clone ID: 700903436H1
gggaggtgcatgcgggaaccagatcggagccaagttctgggaggtggtgtgcgcggagacgggatcgattcaacggggaggtaccaaggggacaacgagttgcaactcgagcgagtcaacgtctactacaatgaagcgagttgcggaaggttcgtgcctagggcggtgctcatggatctggaaccagggaccatggacagcgtcagatctggtccctacggtcagattttccggccagataacttcgtctttggac

SEQ ID NO: 91131 - DNA, 255 bp, Glycine max
  Clone ID: 700903437H1
caagactcatactctcaaagcgccgcgccgcgccgcgccgtcgaactcaaatcaccctctgtcaaccggcggcgcgtcgcaggaatcgatgaagttgcctgaagaagcagcgtcgcaatcagttcctcgctcgctagagttttggattcgtgtgtttgaggaggttatttatggccacttgtatggcagcgattcaacgaattattcttgactcgtgaacttggcagaggtagtgtgaatttacgttcgaaaaat

SEQ ID NO: 91132 - DNA, 256 bp, Glycine max
  Clone ID: 700903439H1
aacatcatcatgtcggacgaagagcaccatttcgagtccaaggcagacgccggtgcctccaaaacctaccctcagcaagccggtaccattcgcaagaacggctacatcgtcatcaaaggacgcccctgcaaggttgtggaagtttcgacttccaaaactggaaagcacggtcacgccaagtgccactttgttggaattgatattttcactgccaagaaacttgaggatattgtgccctcttctcacaactgtgatg

SEQ ID NO: 91133 - DNA, 253 bp, Glycine max
  Clone ID: 700903441H1
agagtatccccaccaatggggaaagtgcgcaacaactgtgtttggcttttgctgcaaatatcgtaatatcattgccattcccatttgcagcaaaagggaatggcaatgatattacgatatttgggaatgtgcaacaaaagacactagaggtcgtgtatgatgttgagggtgggaggatagggtttggtgctgctgggtgcaactgaagttagtttgattaatagtggagttaattaaacatgctttgggcttg

SEQ ID NO: 91134 - DNA, 254 bp, Glycine max
  Clone ID: 700903445H1
aacaaacccactaagatggcttcctttgtatccttcctagtgctgcttcttgcagcccttatcctcatgcctcaagggcttgctacttactacaaaccaattaagaagccaccagtgtacaagcctccagtgtacaagccaccagtgtacaaaccaccggtttataagccaaaaccaccggtttacaagccgaaaccaccggtttacaagccaccatataagaagccaccatacaagaaaccaccttatggaaa

SEQ ID NO: 91135 - DNA, 252 bp, Glycine max
  Clone ID: 700903446H1
ctgaggcgcatttgacttctgccgctgcttttgtggagggtggaattcaggatgcttgtgatgatgcttgcagcatatgccttgaagctttctgtgatagtgatccctccacggtgacaagttgctagcatgagtttcatcttcagtgcattctggaatggtgtcaaagaagctcccagtgccccatgtgttggcaacctatcagtctcaaagatccaacaagccaagaattacttgaggcagtggaaagag

SEQ ID NO: 91136 - DNA, 250 bp, Glycine max
  Clone ID: 700903448H1
gttgtgtgtgtgtgcgcgtttgtagataactgttgattgtatgtctttcatgctatagcaggagtgtataatctgagcgatgtcagatcttgaggctcccttgcgccctaagaggaagaaggtttgggtggactatttcgttcagtttcgatggatccttgttatttttgtggtccttcccatctccttcaccatttatttccttacataccttggggttgtaagatctgagtggaagtcctataagacg

SEQ ID NO: 91137 - DNA, 130 bp, Glycine max
  Clone ID: 700903450H1
aatattttcttttatgaaaatggcgcgtggcaagaatctgttcctccaaattctgtggtgtttttccttgatcggtcttagttcccaagcacagaattacgcttttgttgtgagagaggccaagtataca

SEQ ID NO: 91138 - DNA, 119 bp, Glycine max
  Clone ID: 700903451H1
gttttaaccatggaatcagcggcaagaacaacaacaacaacaacaactcatatagcccttgtttctatcccagctttcagccaccaagtctcaatcctcgagttcgcaaaacgtctcct

SEQ ID NO: 91139 - DNA, 253 bp, Glycine max
  Clone ID: 700903453H1
ctttatggaagatgttcccgacacggcggcgaaccggtccgagccggggctcagggcggagatcgacacatcggtggccgttcgaatcggtgagggaagccgtcacgcgattcggtggagttgggtattggaaacccattctcaacggtcttagtaacaagcattttgcggacactgagccgcatcacacagaagagcttgaccctgaaaaactggaggagcaagctactgtattggagaaagagctgatcct

SEQ ID NO: 91140 - DNA, 252 bp, Glycine max
  Clone ID: 700903456H1
gaaaagggtttatggcttaactcttatgcttatggttgtgtgttccgttgcctcagggctctcttttggacacacccccaagggtgtcatggccacactttgtttcttcaggttctggcttggctttgggattggtggtgactaccctctatcagctacaatcatgtctgaatatgccaacaaaaagactcgaggggcattcattgctgcagtgtttgcaatgcagggttttggaatcctggctggtggaat

SEQ ID NO: 91141 - DNA, 248 bp, Glycine max
  Clone ID: 700903458H1
agggactaccataatttttctctcccaaacaaacccaagactagaagaaagatagaaaagagtataaacacacaatatctctttaaactcttgacccttctcttggaggcatggctttcccaattctcttccttctcttcatttcccttcccttctcctccgcaaagctcaacgtctattactacaaaaacacatgcccagacttcgaaaaaatcgttagggaaaacgtcttcaccaaacaaagcgct

SEQ ID NO: 91142 - DNA, 252 bp, Glycine max
  Clone ID: 700903459H1
ggccaccgtaccatcaccagcaacaacgggtccagtacgtgcagaggcatttgctgcagcaacagcagcagcaatggctgagaagggacggcagcgccgccgtcgacgaggtcgagaagaccgtgcagtctgaagccgtggattcgagttctcaagattggaaggcaagactaaagcttccaccagctgatactctcgataaaacagaggatgtaacggcaactaaaggaaatgagtttgaggattactttt

SEQ ID NO: 91143 - DNA, 159 bp, Glycine max
  Clone ID: 700903462H1
ctcgagccgtgcggctgctgattttgacgaggatgaattggaagcagaacttgaagaactaggagggtgctgagtccgaagaacagcttcttcagccagcaactacagctccggcggccccagtgcaggtcccagctgggcagcaacctactcgcccat

SEQ ID NO: 91144 - DNA, 255 bp, Glycine max
  Clone ID: 700903466H1
tgagagttgaaaaacaatggatggcttgttttgtttttatgatgatgagtagtattatataataatttatgggagcagaaagacaagacaaaacaagagagaatgagtggcggatgaggaggagaagaggaagcaactctggagttcactccgacgtgggttgtggccgccgtttgcacagtcatcgtcgccatatctctcgctgctgagcgcctccttcattatggcggaaagtttctcaaagccaaggaccag

SEQ ID NO: 91145 - DNA, 253 bp, Glycine max
  Clone ID: 700903468H1
tgggtttgtggaacacaacgaatgcagtgtcttgccgctttcacaagtttggtgatgaccaagagaatctggtcttccaaggtgatgccacgtcttcttccaggggcatagaactcacaaagttagacggtggaggaaaaccagtgggtggcagtgtggggagagtgttatactcttctccagtgcacctgtgggaaagctctacagtggtcgcaagctttgagaccggacttcaccttttccatctcatcag

SEQ ID NO: 91146 - DNA, 251 bp, Glycine max
  Clone ID: 700903469H1
gtttgtccattgtctctactcttagaacgcgcgcttctaaagagaagagacaatggatcacttgagattcaacgaaaccacccttgtcctcatcggaaccctctcttgcctcctcctgtccatcactgccgtcccctcaactcgcgtcttggaactcgctcccagcgaagcccccaccgcggagcctatagcctccggcatcagcctcttcgacaatcttcttgccaaggaatcaagccccatgattctga

SEQ ID NO: 91147 - DNA, 252 bp, Glycine max
  Clone ID: 700903471H1
gtagctttggtcccttgtttttgttgtgctatggcgcctgatgctgccgccgccaacggcaaaaagagaagacgctatcttcctcataacaaggcagttaagaagaagggttcgtaccctctgcggccaggcgtgcaaggttttttcatcacttgcgatggcggcagagaacaccaagcctctcgtgaagctctcaatattctcgattccttttatgaagagctagttgatggggaacattcaagtgtaaag

SEQ ID NO: 91148 - DNA, 252 bp, Glycine max
  Clone ID: 700903472H1
cggacgtacccttgctgactacaacatccagaaggagtcaactctccacttggtgttgcgtcttcgtggtggtatgcagatcttcgtcaagacccttacgggtaagactattaccctcgaggtggagagctccgacaccattgacaatgtgaaggcgaagatccaggacaaggaaggaatcccaccggaccagcagaggcttatttttgctggcaaacagctagaggatggaaggaccctcgctgactacaa

SEQ ID NO: 91149 - DNA, 250 bp, Glycine max
  Clone ID: 700903474H1
agcaaatggtggtgctgatcacctagagagggaagacaggggaagatttaggaacagattgtcatctggaaggttgccggccactcaccatttgtcacctggagagggaagggtccatgacagaataagaggaagattgcaagatgatgagaggagaaactccaaggatcgattgatggggagagaactaccgggtgataggagtgattttgctgggccaaaaagtctttctgaacttaaaaatgggagg

SEQ ID NO: 91150 - DNA, 249 bp, Glycine max
  Clone ID: 700903475H1
tggtcactgacctatcttggaagagttttgaagtttaaaccttcatgcccttttgcctttagattctgattctgagtctctgctgctatatatggcgccacgcgtatttcttgtgttggggatgttgctgatggtgtgccttgttaaggtttcgtctgatccaaagagagaagaagaaatactggaagaagaactacattttcccgataacgagccacttattgtgagagacgggaacagaaggctaat

SEQ ID NO: 91151 - DNA, 249 bp, Glycine max
  Clone ID: 700903476H1
ggcgcgtgcttcggtgtcctcgaggcgatgttcacctttcgtgttctcgatttccaaggtttgatttgaggtaaaataagaaccgagaattggagttttcgaccttacctgctggtgaatgtggagttttgtaatgcagtttatcaaatcaatatccggttttttttagctctccagtggtgaatgtacttgctgataattattttttatgatattctattgtgatgaagttgatgttgatgttgagtt

SEQ ID NO: 91152 - DNA, 86 bp, Glycine max
  Clone ID: 700903479H1
cgaaaggccagtgaaagccaagattgggagattgagaatggaaagggcgtggattgttcaagctcacagaggcgtcagtggaagcc

SEQ ID NO: 91153 - DNA, 245 bp, Glycine max
  Clone ID: 700903482H1
aaataatcgctggccctatcacattattgttaatattcttcccttctttacctactactttccgaatccagaaaacaccacaacgccacccagaattgttgggttccattctcaaaacagagaacaagaagaagaagaaagagagagagtgatcacgggaaaagcaaaaagttgtttctgtgattgattctctgcaaccgaatcatcatcagccacttcttcccgtttcatctctcccatttctt

SEQ ID NO: 91154 - DNA, 249 bp, Glycine max
  Clone ID: 700903484H1
agttgaagaagcctgaacgttatgtaaaaaaagaagaaaagaaaggtgtggttgagggagtgaggaaatggtgcacagcgcgtacgattgtctggaactggtgcgcgagtgcccagccaagatcgaatccatcgaatcctacgattcgaagcttctcgtgggctgctccgatggatcgctccgaatattcgccccggaaacggaatcttcctcctccaacgggtccaagtcctacgcgttggagaagaa

SEQ ID NO: 91155 - DNA, 250 bp, Glycine max
  Clone ID: 700903485H1
gctcccaactgagtaatcatgatggcaaagcaaagtctaaaacaccacacagtgagattctgaaccaagacaaagaaagggttaagtacattaactcaaggatctcaaagaacttgggccaagatagtagtgtgagtgaattggactcagttacactaccagccaagtctggtagccttattgggtctgggaattactttgtggttgttggtcttggaacacccaagagggacttgtcactcatctttga

SEQ ID NO: 91156 - DNA, 247 bp, Glycine max
  Clone ID: 700903487H1
cgaagtagaaggaaagaagcaatcatttccaatgaaacagatactactaatggagatgagttggtacactagtcctgaagagggtgctggtgaatctagttcttgtgcttcagacgtttatcgattgggggttctcctttttgagctattttgtccgctcagctcaagagaagaaaagagtagaaccatgtctagccttagacacagagttcttcctccacagttacttctaaagtggcctaaagaa

SEQ ID NO: 91157 - DNA, 251 bp, Glycine max
  Clone ID: 700903488H1
gtaactgtcagcatcattctgccgtcgacgaagctgaaacttgtttcttcttttccttgcgcgaaccttttctactaaccccaatcgcttctctcccactccaattccccattcctcatctacataaccccaaccccacactctcacacaccaccaccaacatcatatattacatcgattctcaatcaaatcccaaacgttttgaaaccaccgtcacgatgatgctcagaattcgtagccgcgacggcctg

SEQ ID NO: 91158 - DNA, 247 bp, Glycine max
  Clone ID: 700903489H1
cataacgagaatctgagcgtgaatttgagtagcgaggggagtttggaggactatgattcgatggagagtcagaatcttcaatgggcgcaggggaaagcaggggaggatcgtgttcatgttgtggtgtctgaggaacacggttgggttttcgtggggatctatgatggtttcagtggacctgatgcacctgattaccttctctccaatctctacaccgcggtgcataaggagcttaaagggttgttgt

SEQ ID NO: 91159 - DNA, 248 bp, Glycine max
  Clone ID: 700903490H1
ggaaggtttggaattgctgaaaactgccattgccaaagctggttacacaggcaaagttgtcattggaatggatgttgcagcttctgaattctacaaggaagataaaacatacgatttgaacttcaaggaagataacaatgatggctcacagaagatctctggagatgctttgaaagatctatacaagtcatttgtgacagagtatccaattgtttcaattgaggatccttttgaccaggatgactggg

SEQ ID NO: 91160 - DNA, 268 bp, Glycine max
  Clone ID: 700903501H1
aacagccaccgttgatttgatgcttaacctctcacccaaggaagctgctgctgctgatggtgcagatccacgtgagaagccaaagacttcgccgaaggagaagacccttctgcttcccgatcccgccaagcctcctgccaagcgcaagtggtgggatggccacccgtgaggtctttccggaagaacatgttcgcagcccaaaagagcagcggcggagaggaaagcgaaaagagcagccctaatgcaagctttgtcaaagttagcatgg

SEQ ID NO: 91161 - DNA, 262 bp, Glycine max
  Clone ID: 700903502H1
acaaactcaaaaatcaaaaaccaaaagggcactgactaattttcacaatcaactggattcaagctggttttctcttcctcttcttcatgttcattgattggatcccatctcaccccaattttctaatgctttgtctctcatctcccacgtgcactttcctcttctccgctctaaataattctacattctctctctctctctctctctctcaatacaatattatatgtgtgtgtggaaaaaagaaccgtttttcttttcagcg

SEQ ID NO: 91162 - DNA, 83 bp, Glycine max
  Clone ID: 700903504H1
gtaggtttgtacatcttttggtttggggcgaaagttcagccttgtcagatttgcatcaatttcaacagagaacaacgtcattt

SEQ ID NO: 91163 - DNA, 261 bp, Glycine max
  Clone ID: 700903505H1
gaaaaagttagggtttgtaactttgtcttttgcttgcgaatctgaatcgaataataatcaatcaatcatcatgtcgtcggcgaagaagatcacactgaagagttcggacggcgaggctttcgaggtggacgaggcggtgcgctggagtctcagacgataaagcacatgatcgaggacgactgcgccgacagcggcatccctctgccgaacgtgacgagcaagatcctggcgaaggtgatcgagtactgcaagaagcacgtc

SEQ ID NO: 91164 - DNA, 261 bp, Glycine max
  Clone ID: 700903506H1
cacctttctcctaaaacatctccagtgggttcttcttcttctattacaacaacgtcctacaagaccatgaccatggccatggccacgatcctgctcctgttcacggtcttcgcggtttcatcggccctagacatgtcgaaatctcgtacgacaacgcccacgccgccacgtcgcgcacacagtggagctgatgtccatgtacgagcagtggctagtaaagcacggcaaggtgtacaacgcgctcggagagaaggagaagag

SEQ ID NO: 91165 - DNA, 262 bp, Glycine max
  Clone ID: 700903507H1
agggatgagagagagaaaattccagactcaagtgctgtaaagccagatgactgggatgagaatgcacccttggaaattgttgatgaagaagctgagaaacctgaaggatgggacaatgaacctgaggagatagatgatcagaggcaacaaaaccagaagattgggacgatgaggaggatggtgaatgggaagccccaaagattgagaacccaaaatgtgaagcagcccccggttgtggtgagtggaagaggccaatgaagag

SEQ ID NO: 91166 - DNA, 259 bp, Glycine max
  Clone ID: 700903510H1
gcgcgtgatcattatctatctttcaagtcatgcttaatttgtattctgtgaagtttgcaacaaggagcaaaatatatatgaagaaaagctagtcaaagggtggtatatatagtttgccttttttttgttctcaaatctattaggctgatgtattttccttctcttttttacttgtgtgtagttttccctgcctaaagtacgtacttagtctttttccagtgaaagaaataagcaaaaaaaaaaaggaattaccaaaatt

SEQ ID NO: 91167 - DNA, 259 bp, Glycine max
  Clone ID: 700903511H1
ggtgcagaaagggccattttctgaatgcgctctatctatctcttccgatctggctactaaccctaacccgcttcgaaccgtggcttcctcggcctcgcagaacctctctcgaagaaaatcttcttcttcgtcttcgtttctcaacaaacttccgggtcgacccggatcgtttaccgcgaacctcggatcccatcggaatccaattttccgatctggcagcagaactggttcatcgcattgctcttcctcatggctctcg

SEQ ID NO: 91168 - DNA, 261 bp, Glycine max
  Clone ID: 700903512H1
ctagaaacagtgtgatgaaaatgaaggtccttgttttcttcgttgctacaattttggtagcatggcaatgccatgcgtacgatatgttccctctccgaatgaacactggctatggtgcccgtactccggaggtgaaagcgcaagttggaggcttgctgatggaagcacacaacatctttggctttgagaccattcctgaagagtgcgttgaagcaacaaaggaatacatccatggcgaacaatatagatcagactccaaaa

SEQ ID NO: 91169 - DNA, 262 bp, Glycine max
  Clone ID: 700903513H1
ggcgttctacagcgaggaggcgaagttgaacaatgaatcggacgatttgcagaactctatcagactcactaaggataacatcaaggctatcattatggacgtgatgttcggaggcacggaaacggtagcgtcagcgatcgagtgggccatggcggagctcatgagaagcccagaagatcaaaagcgggtccaacaagagctggcggatgtagtgggcctggaccgtcgggccgaagagtccgatttcgagaaactcacttat

SEQ ID NO: 91170 - DNA, 261 bp, Glycine max
  Clone ID: 700903514H1
acgcggtgagtgagtgagagacggaaagtacaaagccaccgtcttctcttctcagagcttggctttgcttatcgattctctctcctctcatctttctcattcaaggtttgtaaaagatggccgatgctgaggatattaaccccttgtttgtgacaatggaactggaatggtcaaggctggatttgctggtgatgatgctcccagggctgtctttcccagtattgttggccgacctcgacacactggtgttatggttgggat

SEQ ID NO: 91171 - DNA, 264 bp, Glycine max
  Clone ID: 700903517H1
ctgaaccaaatcatcacacacacatactaagaagcaacaattcttctacaatggatctcctccttctggaaaagaccctcataggtctcttcctcgctgcggtggtcgccatcgccgtctccaccctccgcggccggaattcaagctcccaccgggcccactccccgtcccaatcttcggcaactggctccaagtcggcgacgacctcaaccaccgcaacctcaccgatttggccaaaaaattcggtgacatcttcctcctccg

SEQ ID NO: 91172 - DNA, 259 bp, Glycine max
  Clone ID: 700903518H1
gcgcggtgagtgagtgagagacggaaagtgcaaagccaccgtcttctcttctcagagcttggctttgcttatcgattctctctcctctcatctttctcattcaaggtttgtaaaagatggccgatgctgaggatattaaccccttgtttgtgacaatggaactggaatggtcaaggctggatttgctggtgatgatgctcccagggctgtctttcccagtattgttggccgacctcgacacactggtgttatggttggg

SEQ ID NO: 91173 - DNA, 93 bp, Glycine max
  Clone ID: 700903520H1
gaagtaataagttctaaatgttcgtgactgaaatgcatgtacttccattgtattttgacttttatccttgatcacatgtgatgtttgacagac

SEQ ID NO: 91174 - DNA, 87 bp, Glycine max
  Clone ID: 700903521H1
tgaaaatgggttcttctttgtggactttgtgtctaattttggcttcactagcctcttctgcattctgtgcctttccacacaagatac

SEQ ID NO: 91175 - DNA, 259 bp, Glycine max
  Clone ID: 700903522H1
ctcaatacccttttgatttgtgaaaggaaagcaaacatgcttgatcaggtccaacaccctacaatcatggacaaggttgctggccagctccatctccgttctggtgtttctggtattaggagttatgaaggagcctctgctaccccacaatgtaccaaagaccctcttttgggaattactcgaatgctgcattgcagtatcctgtgatgccctcatgcaaagctactatggatttgtctgctgctgcaacaactgcctc

SEQ ID NO: 91176 - DNA, 145 bp, Glycine max
  Clone ID: 700903524H1
ggcgtgcagagaatctcacaggtgcggaatatgaagccatagacaagatactactgaacaaacacgaaatggtcttcaattttgtctctgcactaataacaacagtattgctctccggagccatagttgaagttaaggtcttcca

SEQ ID NO: 91177 - DNA, 260 bp, Glycine max
  Clone ID: 700903525H1
tggagcagaagaaggcaaagatagtggcagagctccaagctgtgaagcacaacagtggcaagtcctacaatcagttagcggaggagactggactcaccaacgtctatgttgctcagcttctcaggagacaggctcactcaatccccaaactgcccctctacttcgggcagcgctgcccgacctgccccaagaccttgtttctgagatgatgagaccccctttgaggtcttatgaccctaatctcatccaagaccccactg

SEQ ID NO: 91178 - DNA, 258 bp, Glycine max
  Clone ID: 700903527H1
cattaatggctgattttggtgactattttgggttgcttttcatttggctagcctccatcttcattttacgtgtaatattattcacaaagtctcgcatcaagtcacgtctacccccaagtcctagagccctccctggttaggacacctctacctcctcaccaagctcccccaccaagcattccacaacatctcaatacgttatggtcctttggtctacctcttgttcggttccaagccttgtgttcttgtttcatcacc

SEQ ID NO: 91179 - DNA, 260 bp, Glycine max
  Clone ID: 700903528H1
cttcccttctccaacatgccaaacgactgcgttcatagtctttacttcttcgttaccctcttcacatgccttctctctgctaattcccacgatgaccatattttcctaccgagtcaactccatgacgatgactcaggagttgcactgctaccgacccaaaccttaactacaagccggtgatcggaatcctgacccaccccggcgacggtgcctctggccggctcagcaacgccaccggggtttcttacatcgccgcctcc

SEQ ID NO: 91180 - DNA, 84 bp, Glycine max
  Clone ID: 700903529H1
atcttttccgggggtacaatacaaattccgaaccccccatattcctccctcgccgatcgctcacgtcagatttgtttttgtttt

SEQ ID NO: 91181 - DNA, 257 bp, Glycine max
  Clone ID: 700903530H1
tagagatgacacccagtgcagatactgaggagtcagaagtattaagtccaaggagaaatcttgaggaggaatatttgacctatgaagccaagattattaccaccttcagtgtagtggataacataaaacagcagtttatgctcaacaggggagaatttccaggaaagatgaagagagagttaaagagctgtttgaagccattgaaaagttacgaactcaatttgagtctatagagagaccaattcttgaaatagaga

SEQ ID NO: 91182 - DNA, 257 bp, Glycine max
  Clone ID: 700903531H1
cagtttctcagtttcttattcgttagatctcatcttacactcaccgtcaagttcgtctcgcgccaccgtcgacgcagttccggccactgcctttggttccctcactttctgtctcttcttcttcttctcagaaatatccttctcagaaggttgaaacgggtcatcaagacacagtccatgatgttgcgatggattattatggtaagaggctggccacggcttcatcagatcacacgattaagataattggggtgagc

SEQ ID NO: 91183 - DNA, 257 bp, Glycine max
  Clone ID: 700903535H1
agcgaattaagacagtctctgaggttttgcaggtaagttttattaaattcagcatgataatatattttgagaattagaattttgtatttaggtttgtagctgtgtagagtatctcctcaaaagttatggaagcctggataatcggcctctctctataagattaaagggactggaatgcatgaaaggttctttggcaaaagcccgggttctgtatgctcctgtggaagagattgccagtgagggtcgtcttttacgtg

SEQ ID NO: 91184 - DNA, 255 bp, Glycine max
  Clone ID: 700903538H1
gaaacacacagaagacagagtgagacgcttctcacgatggagggaggagtatactacgcgcgcatgcctcgggtcaaaatccgcgagctgaaggacgactacgccaagttcgagctccgcgacaccgacgcgagatcgccaacgcgctgcggcgcgtgatgatcgcggaggtgccgacggtcgccatcgacctcgtggagatcgaggtcaactcctcggtgctcaatgacgagtttatcgctcacaggctgggcc

SEQ ID NO: 91185 - DNA, 257 bp, Glycine max
  Clone ID: 700903540H1
ccactgaaaccttcacctccttctcaggttccgccccagaaggattcacctgttgctggggatgataataatgtcattacattagagtttcagaggcagaaggctaaggagcttcaggagtatttcaaacagaaaagcttgaagatgcaaatcagggtcctttctttggattcattggcaaaaatgagattagcaatggaagatgggcaatgtttggttttgctgttggattgctaacagagtatgctccgggatca

SEQ ID NO: 91186 - DNA, 254 bp, Glycine max
  Clone ID: 700903541H1
gctatggagtggaaaatatgtggatgtaggagatttcgggatgaatggcctcaaaacgctttgtcgtttgtggttattgagtcctgagtgatcttgtcatccgacctttgccatgacaggtgcgcttgcatgcaggtcaaaaaatgttaataaaaaaagttttattggtttggggagagatcgcacgggggttgcccggggtctcttcctcttgtgtggtgtggtgtttgctgtgctctccttttcgttatgcc

SEQ ID NO: 91187 - DNA, 256 bp, Glycine max
  unsure (1)..(256): unsure at all n locations
  Clone ID: 700903542H1
gcataacagcaccaacaatggtgaagcattacagacccccggggaagaaaaaggagggaaatgctgccaaatttgttattaggtcacaggcactcaagcagcttcaaatcagtttaccccttttcaggaaacttgtattttgaaaggtgtaactccccgggagcccaagaaaaagttcaagggaactcatcagacttattaccatgtcaaggatgtttccttccttcatcacgagcctttgngtgaaatacataga

SEQ ID NO: 91188 - DNA, 253 bp, Glycine max
  Clone ID: 700903544H1
gtgccacactgacacatcagaatggaaccctaaacatttggcctttcaggtgctcaaagttaagccaggaactattcctgtctgccacttccttcctgaggatcatgttgtttgggttcccaagtagatttgcttcaagtcctttttccatatatgtccttgaataactagcttcaatagcatcagctacagaactcgatgcatgtatttgctcgtactatatagttctctagatatgtatacttttttgctg

SEQ ID NO: 91189 - DNA, 256 bp, Glycine max
  Clone ID: 700903545H1
ctagagtcttcagtttctcctcgttgttcttcgctttcctgttttcaatttcgattctttcgttaatttaataagatgtttgggagggcacgaagaagagcgataatacgaggtactacgaaatcctcggctctccaagaacgcttcgcaggatgatctgaagaaggcttacaagaaagccgccattaagaatcaccccgacaagggcggtgatcccgagaagtttaaagagctggcgcaagcttatgaggttctg

SEQ ID NO: 91190 - DNA, 84 bp, Glycine max
  Clone ID: 700903546H1
gtgagagtgaagcgagaagcgagaagcgacatggatccagacgcgttggcaaatgcattcgtggagcactactactccaccttc

SEQ ID NO: 91191 - DNA, 253 bp, Glycine max
  Clone ID: 700903549H1
gccttgctttcttcttcacttcaaacttgctaatctcgaagatggcaatagaattggcatctcccaattgggttccaaccgcagccgcatgtttggcagccttggccgccctcctcctcttcctcctccgcggctccgccgccgtaaatacaatctccccccaggccccaagccctggcccatcataggcaacctaaacttaatcggctccttcccacacaagtcgaaattaacgctgagtaaaacatacggg

SEQ ID NO: 91192 - DNA, 251 bp, Glycine max
  Clone ID: 700903551H1
cgcatgagagatggaggtagtgggcaaggtgggcgaggtgatttctttcctggtaggggcaacaggggtaggggatccggtggccctcgtgggggtcatgttggttggggtaggggtgaacgtggtatggtgatcggtataacatggaggggcgtggacaaggtcgtggacgtggaagatttgacaatagaagagatgtttcttccaaaggtagaggcagaagtcatagtcgtagccctgaaagagtccga

SEQ ID NO: 91193 - DNA, 254 bp, Glycine max
  Clone ID: 700903553H1
ctcttataatccttgctttggtgcctcttctaggactaaatggatatctgcaattcaagttcttaaaaggattcagtgcagatacaatgaaattgtatgaggaagcaagccaagtggcaaatgatgctgtgggagtataagaacagttgcttctttctgtgctgaagagaaggtgatggaattataccaggaaaaatgtgaaggaccaattaagacaggcaaaaggcaagggataataagtggaattagttttg

SEQ ID NO: 91194 - DNA, 140 bp, Glycine max
  Clone ID: 700903554H1
taatggggcaagtggagggtatgattatataatagtggggggtggaacagcagggtgtccattggctgcaaccctgtctcagaagttcaaagttctgctgcttgaaagaggaggagtccctttcaacaacccaatgtgtc

SEQ ID NO: 91195 - DNA, 255 bp, Glycine max
  Clone ID: 700903556H1
cacaagcctagtgaaagtgagaaaaaataaaaatcaaagagcataatgtcagggatcattcacaagattggggagacccttcatctgggagggcacaagaaggaggatgagcataagggtgagcaccatgctgagaatacaaaggggagcaccatggtgaacacagtagtgagtacaaaggagagcatcatggtgaacacaaagctggagagtaccatggtgagcacaagccagagcacaaagaggggttcctag

SEQ ID NO: 91196 - DNA, 248 bp, Glycine max
  Clone ID: 700903558H1
acgacggctccgtcgaacggcgtcggcgcgtatccggcggcgcgagtaccgcaaggaccgggaggagtggagcgacacggcgattgtgtgcctcctcgaggcgtacacggagaagttcacgcagttgaacgggggaacctgaggggaagggattgggaggaggttgcggcggtggtgagcgaacggtgcgagaatcaatcaaagagcgttgaacagtgtaaaaacaaggtcgataacctaaagaagag

SEQ ID NO: 91197 - DNA, 254 bp, Glycine max
  Clone ID: 700903560H1
aaaaaaaggtacatcatttagatggtatgccgcagttgtgtaaggtctttggttgttcaagctggaaccttcgccaacagagtgagaatcaacggatttgggaggagtttgcaggcagttcagagtttttccattggccaattcgtgaatacaagacaaccacaaggatgatggttgatacgggttctatgtcaagggctggaccccttgttgatacgatgccagagaaagatgatgatggtcggtttgccagt

SEQ ID NO: 91198 - DNA, 254 bp, Glycine max
  Clone ID: 700903561H1
ccctatcgcgcaggagaatgtgttggcttcttctccccgacgaactgtggaggcgaattctggagatcggaatcgagagcaacggtttcagttacaaggatctctgctgcgtctcaatctcatgccgccgcttcatcgcctctcctcggaagaacctctttggaaccgtcttctcttctctgactatccccaatcccaatctcacccttcttcttcttcttcttcttcttcttctaaatctctttacagattaa

SEQ ID NO: 91199 - DNA, 254 bp, Glycine max
  Clone ID: 700903562H1
gaggaatcttgagaaatggcaggggacagcaagagcaagattctgttcatcggagggactggttacatcggaaaattcatcgtggaagccagcgccaaagctggccacccaactttccttttggtgagggatccactctctccaaccccgcaaaatcacccctcatcgacaatttcaaaggcctcggtgtcaatcttgttttaggagatctatacgatcaccagagtttggtgagtgctataaagcaggtcgat

SEQ ID NO: 91200 - DNA, 233 bp, Glycine max
  Clone ID: 700903563H1
tgttcctctcttctcctgaaggatatgcagtgcagatgtgtggtgtgaagtggcgaatccccaaaatgggtgacaacagaaagaagcaccgtcgtgtgcaagactcgccgtcttcctcatcctcttcgtgctcgactccgacgactcttcgcggcggcggcggcggaggcgtcgcgagaaggagatgctcagaaagagcgaggaaaaggaggagcgaaggatgaggaagagag

SEQ ID NO: 91201 - DNA, 256 bp, Glycine max
  Clone ID: 700903565H1
aaataaagaaaattttctcttcgagatggggaaccccactatgagcacataatcataatcatgaagaaagcagggagcataagctctggtctcaaactcacagttcctgctgcatctgatcgtgattcatttcaaagttccggtctgagcctgaaagtggaacgtttaaggctggtgacttgcttgtcaataatgaaggagttcgaattgtctctgagaatgaagtggaagctccacccccgatcaggccacaaga

SEQ ID NO: 91202 - DNA, 253 bp, Glycine max
  Clone ID: 700903566H1
ttctgaatgtgctcgttgtttagaaaaccctaatctgattcaattccagcatggctcaaaaacaaaagctgcgcccttctcctctggacgagccacccaccgcttcctcttccgattccgaggaagaagagagcaacaacaacaacaaccatcctctcagcaacacgaagaagaggaagaagaagtttcctccggagaagaagaggaagcttcctccgaagaagaggaagacgaaaagtgccctcaccaccca

SEQ ID NO: 91203 - DNA, 250 bp, Glycine max
  Clone ID: 700903567H1
aaccaggatgagttggatgacatcataagatatggctcaaaggagttatttgcagatgagaatgatgaagcaggcaaatcccgccaaattcattatgatgctgctgctattgatagattgctggatcgtatcaagttggagatgaagaggctactttggatgatgaagatgaagatggatttctgaaggcttttaaggttgcaaattttgaatatgttgatgaggctgaggctgcagcagaggatgacct

SEQ ID NO: 91204 - DNA, 251 bp, Glycine max
  Clone ID: 700903573H1
cagcattcaacaaacctcttcaccttctctatcttccaatcccatttttcattccctgtcgtctttctttgctttctcatccttttccttttcccaagcaattgtactctttaggggcataatacacgtaagcaagttggtttctggagtagttagagttacatgtgttttgcaggcacatggcaatatatgaactggatcccgatgttgttcgctggggtcttcatctcctagatgattgcacactttcc

SEQ ID NO: 91205 - DNA, 250 bp, Glycine max
  Clone ID: 700903574H1
catttgtgtatgtatctactcaaattcaacatttgattgaggttctatctggggatggctctgtggctatgtggtgggatgaacaaagaatttggattctgaagtcagttaccagcatatttgcaatatagatggaatcaagaagtggctggggttgaacaaggtgaaattcaacttgtcaaacaaagccattgacaaagagaagctcaagaaatatgagcaaggtaggttcgatttccaaggtgcagct

SEQ ID NO: 91206 - DNA, 252 bp, Glycine max
  Clone ID: 700903576H1
gcctccggcagatattctgcaggctgccactgagggaaataatgatatgccgctcagtgtcaaaattcttcctgcagctgctctcaacaccttcgttcctccaggtcctctccagctcccatccaccctccagctcctggccctccgcaaccgccaccacaccccttctcacacctctctccccctcttcgaccccgccaccaaatcatggctccacttccccctcgacttcctccccttccactcccctct

SEQ ID NO: 91207 - DNA, 253 bp, Glycine max
  Clone ID: 700903577H1
tgaaaccaattccaccttcttcttttcgagtcacaccatgaaacctcttttcggcttcgcaatcgcgttcctcctcctcctacattcctctcttgcttccgacatcccctaccccaaagcaatttccgattgaaggatacaattgtgaagggatttgggtttacggcggaagatgatgttaagattacggggttcgatccgagagacgccgaggtagggcattccgtggagtaccaattcgacctccaaatcg

SEQ ID NO: 91208 - DNA, 83 bp, Glycine max
  Clone ID: 700903578H1
cttaactcaattctagttttgtagtgagaagaaaaaaaccaaccactctttttctttcatttgcaatttctgtgtcaccaatc

SEQ ID NO: 91209 - DNA, 250 bp, Glycine max
  Clone ID: 700903579H1
gtggtgatgggtgggtgagtccgaattgtgaaagtaagcaaagatggctttcacggaatcgtctctcctccttccttcggtttcaggaaccaacaagaacaagaacaaggttccagaagacaaatggttttagcctacattgtgtattttaccctgggtctcggttaccttctcccatggaacgctttcatcaccgccgttgattacttctcctttctctaccctgacgccagcgttgaccgcatcttcg

SEQ ID NO: 91210 - DNA, 151 bp, Glycine max
  Clone ID: 700903581H1
ataaactcctaccaaggttctctcgttcactcctctctctctcatcgtacgtgcatccatctctcaacaccaaattactacttgcttctcttattactctccccaatattgcctcttgtactttttatgtgattgcccttgaacccttcaa

SEQ ID NO: 91211 - DNA, 249 bp, Glycine max
  Clone ID: 700903582H1
gctaaattagattagtatctcctcaagcaaaacctagagctcccacactcctccactacttagaatattaaaagccccttccttcatcaaggtactactgtttcatcttccctcaaagattggaacaaaacaggaacatgggtactctaacaactgttcctgtgctcccttctaagcttaataagccttcgctttctccgcgtcacaattctctttttccctactacggaagacgcgtcgggaagaaga

SEQ ID NO: 91212 - DNA, 249 bp, Glycine max
  Clone ID: 700903583H1
actcgagctgaattcggctcgagcgagactgcgtgtggtatccttatagattggctgcaatattaccctttttcatttttgaactatcgtttgaaattgaagtacaatggcactttccttcagggatgaagtgatacctttggagccattcaagttccctccgagaaattatggggagcacaaactcaaagatcgttgcagaacttcgatatcggtgggccccgcgaacgcatgcccgaacccatcatt

SEQ ID NO: 91213 - DNA, 248 bp, Glycine max
  Clone ID: 700903585H1
tcagttttctacttgaatcttcgttatccttctttttttctccttgaactcgaatattcactatggcagatgaggtggttctgctagatttctggccaagtccatttgggatgagggtcaggattgacttgctgaaaagggtatcaaatatgagtccaaagaagaggacttgcagaacaagagccctttgctcctcaaaatgaacccggttcacaagaaaatcccggttctcatccacaatggcaaac

SEQ ID NO: 91214 - DNA, 250 bp, Glycine max
  Clone ID: 700903587H1
tcttgctcttgttcaagattggcctatcaaattatgtaccagcgtcttttgttttcggggattccctgctcgatgtagggaacaacaactatattgtttcactggccaaagcaaaccatgacccttaggaattgattttggaatggccactggtcgtttcagcaatggaagaacagttgcagatgttataaatcagaaactgggtcttggcttttctcctccttacttggctcccactactactggatca

SEQ ID NO: 91215 - DNA, 248 bp, Glycine max
  Clone ID: 700903591H1
cttcctcctctctctgcatcgctgcgttttccgaatcgaaaggtgaggttagtaagtaacaatggtggagaaggccaagggtaggaaggaggaggttgtcactcgagagtacaccatcaacctcccaaacgcttgcatggctgcacatttaagaagaaggctcctaaagcaattaaggagataaggaagtttgctcagaaagcgatggggacgaatgatgtaagagtggatgtgaagctcaacaaggc

SEQ ID NO: 91216 - DNA, 65 bp, Glycine max
  Clone ID: 700903593H1
cttacccttactttgcctacagaagcgaccctggcagagctgataaccttggtttgtgccttttc

SEQ ID NO: 91217 - DNA, 247 bp, Glycine max
  Clone ID: 700903594H1
gatattagcaacaattccctcagtggtaaaatccctcctagtttagcaagatcttctaggatattcaggatcaatttgagcttcaactcactttccggatccattcctagtagtctcactatgtcccttctctaaccattcttgcacttcaacacaacaatctctctggttttatcccagattcttggggtggaactggaaagaagaaagcttcccagcttcaagttttgacgcttgatcacaatct

SEQ ID NO: 91218 - DNA, 225 bp, Glycine max
  Clone ID: 700903603H1
gcaggacgatgagtactcctccagttgttgagcgcgtttcagaatgcttcatcaagccgcagcactccaaccatgaatcaaaccaaatctgctacttaacaccttgggatattgctatgttgtctgctcactatatccaaaagggccttctcttcaagaagccctcatcaccacttgttagtcacaataatttcatagagaacctgttgcagaagctcaagcact

SEQ ID NO: 91219 - DNA, 219 bp, Glycine max
  Clone ID: 700903604H1
ggaaattccacagagaagatccagttttggataaaattgatgctgaactattatccagaggtcctggaatgactgttcccggaggttggtgcatagggaaaagggagaatggcaccgatccctgctctgaagtcggtgatactaacgttctgaggcctggcccaggttccaagagacttgaaacattaatcaactcattgttgtcgaatgaaaagttcc

SEQ ID NO: 91220 - DNA, 79 bp, Glycine max
  Clone ID: 700903605H1
ctcaaattgctttcggttttcgttctgattctgcaaaatcatggagatggagcgcatcgttgaattcccccacacatac

SEQ ID NO: 91221 - DNA, 215 bp, Glycine max
  Clone ID: 700903606H1
gtttgatcctggctcagaaggaacgctagctatatgcttaacacatgcaagtcgaacgttgttttcggggagctgggcagaaggaaaagaggctcctagcgtgaaggttgcttgtctcgcccaggaggtgggaacagttgaaaacaaagtggcgaacgggtgcgtaatgcgtgggaatctgccgaacagttcgggccaaatcctgaagaaagcta

SEQ ID NO: 91222 - DNA, 224 bp, Glycine max
  Clone ID: 700903610H1
gtacaacttgaagataagaaaccatcaggtcaaggaccaccaaagtcaacccagacttctacaaaagcctcctctaccaaccccccaacacaaaaacctgctgcatatcgtcctccacatgctaagaatgcatctgctattcaggcagagttgtttggagagactcctgcagaaccactgagcaagaatgcattacgaaacaagaaaaagagggaaaaacagaa

SEQ ID NO: 91223 - DNA, 227 bp, Glycine max
  Clone ID: 700903611H1
agcaagcaaagcgcgggagaaagagaggcagcaaacaaaaacaatggcgacgtcgctctctgtttcgccatctctctctctcaacactctcttcatcgtcaaagcgcttccactatctcgcccctctattctctctctccctctccccaaatccctactctctctctccacgcgccgccgcaccttcatcgtccgcgccgaatcccaaaacggcgccgaccccgttc

SEQ ID NO: 91224 - DNA, 229 bp, Glycine max
  Clone ID: 700903612H1
aatggaaaaagaggaggaggagcagcgcagtggaggctatacgaaggctacaatgagctccacgcgctggcccaggtattgcacacgcccttcgacgcccccgccgtcttggtcgtcggccaccagaccgacggcaagagcgccctagtcgaggccctgatgggcttccagttcaaccacgtcggcggcggcaccaaaacccgccgcgccatcaccctccacacaacat

SEQ ID NO: 91225 - DNA, 229 bp, Glycine max
  Clone ID: 700903613H1
ctttgattgctttatatgaaggagatgccacatcagaaactactcatattgagattgagccttttaccatcttgggagttattgcagggttaattccatatcctcatcataatcagtcacctagaaacacgtatcagtgtgccatgggtaagcaagctatgggaaatatagcatttaaccagctgcgccggatggacagtttgctttacctactggtttatcctcaacg

SEQ ID NO: 91226 - DNA, 236 bp, Glycine max
  Clone ID: 700903614H1
caatatcttctttgtcgcttttattatctgtttttccggcgatggattccggcgcgtggctcctgttcctggtggtcgtggctgtctcaacgtccggccacattcactctgaagcgatcctgagactcccgtccgagagcgaggagatctcgcgcgactactgcgacagtggatgctggcggtggagacgaacaacgccgggacgtggaaccgcgtgccggcgagttgcgtggact

SEQ ID NO: 91227 - DNA, 243 bp, Glycine max
  Clone ID: 700903615H1
ctctctcgctctctttcgctgcgtcctcggttatggcttctcgcaggctctcatcatctctgctccgaccattcctccgtccatctctgccggaatttcaagctccgacccctttccggctattctctgtcccaaacttttccactcgcgtttctccgttcgccattacaaaattacctgggactgaggtattctcacaatttgagtccggtaatggtttagcatcagtgctgagaagctctg

SEQ ID NO: 91228 - DNA, 237 bp, Glycine max
  Clone ID: 700903616H1
ctcagtgaccagagacagatgatgatggagatggcgaacgaacacgctgtcgttgcggcactcgcggcgttggtgctactcgcggcgagggttccatgctcactttcgaagggcagaagatccaaggcgcttccaacatcgttgccaagctcacctccctcccttttcagcagtgccaccactcaatctccaccgtcgactgccagccctccggcgtcaacgcggcatgctcgtctt

SEQ ID NO: 91229 - DNA, 219 bp, Glycine max
  Clone ID: 700903619H1
attcaaagaaggcgtcttcataaacgcctttattctccgtttccgtttccttcccggaattcgatttttcatctctgaaaatgagagagtgcatctcgatccacattggtcaggccggtatccaggtcggaaatgcttgctgggagctctactgtcttgagcacggcatcgggcccgatgggcaaatgccaagtgacaaaacagttggcggaggtgatg

SEQ ID NO: 91230 - DNA, 216 bp, Glycine max
  Clone ID: 700903620H1
cggatctcttcttcagtggtggaagctactagaacactagtttgctcagcactgcgatgaggaagtggacggttgcttccgctctccttcttctctctctcctctttctctttgcagatcaaggtcgaaagtttcaggcgaatgccgagggagattccgacgagcttgtagatcctccgaaggtggaggacaagatcggtgctgtgcctcatggcc

SEQ ID NO: 91231 - DNA, 122 bp, Glycine max
  Clone ID: 700903621H1
caccccttggtaccacttgtatcactccatcaccttgaccaattcagccccttctttcccaaccagactcaattacactcaatgaaaaagctcatcagtgcataccacattgaccctgcccg

SEQ ID NO: 91232 - DNA, 214 bp, Glycine max
  Clone ID: 700903622H1
cctggattccataatctgtgttaggaaaacttccacatccaaggtctaaagaaccactggtgaccaaaattgtgaaaaggggttccttgattttcaccaattcatggcatttcagcactacatttcccgggatttgaaaaccatcccaaatgctgtgactgaggcagaaaaccccaatggttgttttgattgtaacatctgcttagactttgca

SEQ ID NO: 91233 - DNA, 214 bp, Glycine max
  Clone ID: 700903623H1
ctctgttcctcttctgggtctcgttactctttcagattgttgctaaatttggcagaaaaaagccacgtgtatttctgagagattgtgttgtgtataatgaggactttcgttgaggattggaacctggagtgttgggggttaaggaaaactagaaccgaatgatgcgtaaaccagtgtcacaagaaaagacaattgctttacgcatcattcggtt

SEQ ID NO: 91234 - DNA, 221 bp, Glycine max
  Clone ID: 700903625H1
gcaaaagaagccagcaatggccaagtccaagaacaatgccaagaagttgtcctacatctcagttccatctcagatcatcaattccatctcatcttcatctcttcaatctctgcttgaatctcccaagaagtgtgcaaggcactccaaattcttcacctttgtcaagtgcatgaggccaagactcttcttccttttcaccctctttttccttgctttctttg

SEQ ID NO: 91235 - DNA, 222 bp, Glycine max
  Clone ID: 700903626H1
attcattgtcttaatgttagcaatgtcttcctctttctccatccatttcttcctcctcctctcaatagccctttgctcagtttgttgcttagcagcatctcaagctcccaccaccaaatcacacccctatatccttcccattaagaaagaccccgcaacaaatttgtactacacttcagttggcattggaactcctaggcacaactttgatttagtcattga

SEQ ID NO: 91236 - DNA, 223 bp, Glycine max
  Clone ID: 700903627H1
cacctctgtagtgtagccaccaccaatcacaaatagccctcttggccttcaatttcgtccaattccaaatcatggctagcttttcagttttcacgtcttacattgttttgagtctagtgatggcactagcaattagcggtttcaatttcaaaggggcagaggcagcacgtgccttctttgtgtttggtgattctctcgttgacaatggcaacaacaactactt

SEQ ID NO: 91237 - DNA, 231 bp, Glycine max
  Clone ID: 700903628H1
ccatgttccatgtttccaccgttgcgctgacctctcaacctcacactttcctctttccactccccttttttccctcccgcaacctccaactttcacaaactctacaattccccagaaactggaacctacgctctatctcgccatcgctgcacccaacgccgcaatacgacgattccgaagaccacgtcatcggcgactgcgtcgtgttcgaggacggcgttttcgacgaac

SEQ ID NO: 91238 - DNA, 238 bp, Glycine max
  Clone ID: 700903630H1
gaaacgcatacgcgcaatttctgttgttcagagctcttcaggaagaaaagaaaaacagagaaaaccaaaccctaattagaaacgatttcggaatccctaattcgcaaatcgcaaccctagttgtgctgtgcgttgttgtagtggtttttggaagaggaggcttgagctaaacgctgcgtttcgacgacgatgatcgtgagccagaacatggtgacggaggcggaaattatttgcaagc

SEQ ID NO: 91239 - DNA, 240 bp, Glycine max
  Clone ID: 700903631H1
gccatttgggagttaggttctgcacgctctgcttccagcgagtgttctttcttcgtttcaacaccttaatttgcatacgctgcttcttcagcttgagaaatggcacaagaaacctttctattcacatctgaatctgtaaacgagggtcaccccgacaagctgtgcgaccagatctctgatgcagtgctcgatgcgtgccttgaacaggaccctgacagcaaggttgcctgtgagacatgc

SEQ ID NO: 91240 - DNA, 238 bp, Glycine max
  Clone ID: 700903632H1
acgcaccagaaaacgtatgggcaaattggcagtggagatcaattaacgatgtgtacatgaatggagcattttttgtgcaatctgggcctgagctggctagcagaccattctcaagagaagacatgatcaccgctaaggtaggaaattatgtaggaaggcttacacgctattctggcaacctgttgaagtgcagagtgggtcgccttgttaattatcctttttcccattaattctcttc

SEQ ID NO: 91241 - DNA, 222 bp, Glycine max
  Clone ID: 700903633H1
caaagtttaagtcatcatgggtaaggaaaagactcacatcaacattgtcgtcattggacatgtcgactctgggaagtcaactaccactggtcatttgatctacaagcttggaggtattgacaaccgttcgattcaaaggtccaaaaaggggccccctaagttgaacaggaggtcatccacgtatccctgggtgcttgaaaacctcaaggctgagcgcgaaag

SEQ ID NO: 91242 - DNA, 224 bp, Glycine max
  Clone ID: 700903634H1
cttggttttaattggtataggcgtgccaaggtcttgttaattttgagcgttaagtgctgcaactaatcagatcccaagaccttggcctaccttgccatacggaaaaaaaaaagccaaaaaaaagccagggtttgggaccaccaaaaattaccccaaggcccaagtcatggaaagaataagggttggaagtgcaacagaggttgctttcaccctcttggccattt

SEQ ID NO: 91243 - DNA, 218 bp, Glycine max
  Clone ID: 700903635H1
cgatctcaacggagcacctctcttcaggtcgccatctagactgcaatcatggctgatggaccacagcatccatcagttgttcagaagctagctggacagtcttacctggtgtccaggctaagccccaactttaactctgggaattattcctcgactggttcttacttcaatggaggactgcactcttctgagttggctgttgtgtcgcctggatctcc

SEQ ID NO: 91244 - DNA, 113 bp, Glycine max
  Clone ID: 700903637H1
caatggcttcactttccctctctctctccacaccaacaacaccaacctcactctccttcacatcatcctccatcttcttctcttcacaccaattccacacaacatacgagcat

SEQ ID NO: 91245 - DNA, 211 bp, Glycine max
  Clone ID: 700903638H1
tgacaatgaagctggttttggtacttgttgttgaagttgcatgcttagtttctgggatcttgtcctttggatctgagacactctctgagctttctttcttagaaaatgatgtcgtctcaacaacaagaccttcctcttcatctcaacttcaacctcaacctcaacctcaacctcttatggtggacctcactctcattcatgaagctgattc

SEQ ID NO: 91246 - DNA, 206 bp, Glycine max
  Clone ID: 700903639H1
tccaattcctaattgtttaaacctaattcttatttcttcatcgttcgattcttcgtctcctaaagatgcagatcttcgtgaaaactttgaccgggtagaccatcacccctgaggtggaatccttccgaaacatcggatactgtgaaagctaaggtttcagacaaaggaggggttccccctgaccagcggaggacttatctttgcgg

SEQ ID NO: 91247 - DNA, 215 bp, Glycine max
  Clone ID: 700903640H1
agcagccataccatctgagctctcagccgctgaagctgcagcgttgccaatcgccgggcttacagatcgtgatgccctcacttaaattgcaggagtcaagcttgatgggactggccagctcaagaacattttagtaactgctgcttcaggtggtgtaggtcactatgctgttcaactagcaaaactaggcaacacccatgtcacagccacttgtg

SEQ ID NO: 91248 - DNA, 216 bp, Glycine max
  Clone ID: 700903641H1
ctctaaaccctaaacaactctttctcttcttccttcgctcgttgttctccctcgcgtagatcgacaatggcggagacagagacgtttgctttccaggctgagatcaacctgctcctcagtctcatcatcaacaccttctactccaacaaggaccttttccttcgtgaactcatcagcaacgcctccgatgctttggacaagattcgatttgagagt

SEQ ID NO: 91249 - DNA, 212 bp, Glycine max
  Clone ID: 700903642H1
gcagcaaaccatgttggcgaaaatttcttagcaatgctaaggaagtctgtcttgatgcctaaatcagcaatggcatttactattgcggcatcggtgttagggcaagtaattggttcaagagctgagaggtacaggctgaaggcagttgctgcaagaaaggtgtctataactgaaacctctggtgttggtcctctccagttaccagtggctac

SEQ ID NO: 91250 - DNA, 231 bp, Glycine max
  Clone ID: 700903645H1
ttcgatttgttgtggattggatgatggaaaaaccagcaagcccctttcattgaaagggcgcagtgaactgtaattgtgaaaaggttggaagatctggccaaagaaggtgatagccctgtagattcgttcccatggttcgatccttcccagtaaaacgcggcgtgttcgaattctgatcgcttttacgcgagaaagggggaccaccctctaagcctaagtattcctcaatga

SEQ ID NO: 91251 - DNA, 238 bp, Glycine max
  Clone ID: 700903647H1
gttcttccttctcaaatattcttgagatccccattttctccgaagcaaagccatggctaagggtcctggtctctactctgacatcggcaagaaagctagggatctgctgttcaaggactaccacagtgaccagaagttcaccatcaccacctactcaccgactggagtggctattacagcatcaggaaccaggaaaagtgaactgtttctggctgatgtcaacaccagttgaagaaca

SEQ ID NO: 91252 - DNA, 126 bp, Glycine max
  Clone ID: 700903648H1
gagagatggatccagacgcgttggcaaacgcattcgtggagcatcactacagcaccttcgacaccaacaggaacctcttagcgaatctctaacaggagggttccatgctcactttcgaacagcaca

SEQ ID NO: 91253 - DNA, 114 bp, Glycine max
  Clone ID: 700903649H1
tagcatttcatatgttctggctcattttaattttggtttgcagattgcatgccgagactatcctcacgcgcgacatctgtgtggtaaatttccagcctcttccacacaacataa

SEQ ID NO: 91254 - DNA, 219 bp, Glycine max
  Clone ID: 700903650H1
cgaagagcagtagaaagaaattagaatggccactttagacgaacgcccttctgcgaaaaggtggcttcctcttgaagctaaccctgaagtcatgaaccagttcctttggggtcttggccttccattggacgaggcagattgctgtgatgtgtttggcttagatgaagagcttctggaaatggttccgaagcccgtcctcgccgtgctttttctttatcc

SEQ ID NO: 91255 - DNA, 215 bp, Glycine max
  Clone ID: 700903651H1
gccagacactgacgatgttcacgtcgtcgctgtatctcgccgcgttgctgtcgtcgttggttgcctccaccgtcacacgtaggttcggccgaaaactctccatgcttttcggaggcttgcttttcctcgtcggtgcccttatcaacggttttgcccaacacgtgtggatgctcatcgtgggtcggatcttgctcgggttcggtatcgggtttgcc

SEQ ID NO: 91256 - DNA, 213 bp, Glycine max
  Clone ID: 700903652H1
aaacacaagccaagtgaaagtgagaaaaaataaaaatcaaagagcataatgtcagggatcattcacaagattggggagacccttcatgtgggagggcacaagaaggaggaggagcataagggtgagcaccatgctggagaatacaaaggggagcaccatggtgaacacagtagtgagtacaaaggagagcatcatggtgaacacaaagctgga

SEQ ID NO: 91257 - DNA, 135 bp, Glycine max
  Clone ID: 700903655H1
tagacatctagattgcacaaggtgcaaaacctggtgaaggtggacaattgcctggaaaaaaagttagcatgtatattgctaggttgagaaattctaaaccaggagttcctcttatatctccacctcctcatcatg

SEQ ID NO: 91258 - DNA, 218 bp, Glycine max
  Clone ID: 700903657H1
actcgctctatttctcagcgtctgtgtttgcggctgaggattccgaacgagtgaccttcttcgtttctcgcaaagttcaagtaatcatgggtaaggaaaaggttcacatcaacattctcgtcattggacatgtcgactctgggaagtcaactaccactggtcacttgatctacaagcttggaggtattgacaagcgtgtgattgagaggttcgagaag

SEQ ID NO: 91259 - DNA, 223 bp, Glycine max
  Clone ID: 700903659H1
cgctcctcacttgcagaattctaagaaggcgtcttcataaacgcctttattctccgtttccgtttccttcccggaattcgatttttcatctctgaaaatgagagagtgcatctcgatccacattggtcaggccggtatccaggtcggaaatgcttgctgggagctctactgtcttgagcacggcatcgggcccgatgggcaaatgccaagtgacaaaacagtt

SEQ ID NO: 91260 - DNA, 173 bp, Glycine max
  Clone ID: 700903661H1
gtagaatccagcttgttcacaggatttgtacaagtgattgttgttgcctacaagaacagaaaacttccattaccaccaaacaactcccctccacattaccattataagaaggagtcagaccttgtcgttccaaccgataaactaagtttcctgaatagagccctgtgttatca

SEQ ID NO: 91261 - DNA, 231 bp, Glycine max
  Clone ID: 700903662H1
ctagcaatggaggcgattaggaagagtaggattcttatatttggaggaactggttacatagggaagtatatggtgaaggcaagcgtcacgttaggccatccaacttttgtctacactcgccctcttgatgcacaaactccttcctctaaggcacagctttgcaaggagttcaactctatgggggtcacacttgtccatggagaacttgagcatgaccagattctggcagtg

SEQ ID NO: 91262 - DNA, 246 bp, Glycine max
  Clone ID: 700903663H1
gctcgatcatttgcataacttcgctgatctctcgttttcaccatctgggcctcctcagttttcgcatcgattcttgttcttctcgatccattggtgatggcatcgatgggttctttaccgtttcttgtggaagccaatgccgactccactttgatgatgatgatgcttcagaacaggaatcacaagttttcttcaccaaagtttaacactgtgaatgcttcatcgttagtaagaggatgggggcgt

SEQ ID NO: 91263 - DNA, 224 bp, Glycine max
  Clone ID: 700903665H1
ggaagacttactcggccttttaaggattcacatcaagcgcggtgtcaacctcgccgttcgtgatgtcaatactagcgatccatacgtcgtcgttaagatgggcaagcagaagctgaagactcgtgtgattaaaaaggatgttaatcctgagtggaaggaagatcttacgctttctgttacagatccaattcatccatttatactgacagtgtatgactatgaca

SEQ ID NO: 91264 - DNA, 220 bp, Glycine max
  Clone ID: 700903666H1
cctcgctctatttctcagtctctgtgtttgcggctgaggattccgaacgagtgaccttcttcgtttctcgcaaagtttaagtaatcatgggtaaggaaaaggttcacatcaacattgtccgctttggacatgtcgactctgggaagtcaactaccactggtcacttgatctacaagcttggaggtattgacaagcgtgtgattgagaggttcgagaagga

SEQ ID NO: 91265 - DNA, 201 bp, Glycine max
  Clone ID: 700903667H1
gaagaattcgaagagaaatcaaatcgaatctcatttgatctgtgtgtggttgcggcggcggcaatggcggacacttggcatcgatattcgggacggagaaggacagggtgaactgcccgttctacttcaagatcggcgcgtgcaggcacggcgaccggtgctcgcgtctccacacaacatacgagaaaaggtcgccgtgcc

SEQ ID NO: 91266 - DNA, 209 bp, Glycine max
  unsure (1)..(209): unsure at all n locations
  Clone ID: 700903670H1
tccacacaacatacgacacataactgtgagcctttctttcaggttcttaacttgatcagtcagtagtgtccagantctaagggtagttgcaaattgcaatggctaagcatgatgttgagggtggttccttctctgcaaaggactaccatgatcctcctccagcaccgttgattgatgctgaggaactcacacagtggtccttctacagg

SEQ ID NO: 91267 - DNA, 214 bp, Glycine max
  Clone ID: 700903674H1
ctttcgtttccctcccgaaaatcctcggcatcttcatctccttccaagaagggcttcttcaggttgttctcttcaactttgttctccttttttaactctatttcggattttggatggagcatagtgaaaagctcaattgttgaagatgatgagacacccataaggagtggtgaggaaggtgttgagtctctgccttgtgtgatatcaaacatat

SEQ ID NO: 91268 - DNA, 219 bp, Glycine max
  Clone ID: 700903675H1
ccaacatcagatcaagatataacaaaggcgaatgaacaatcaataaactcatcaatcaaaaaagttaaagttaagtgggagaaagctggttctgatgctgaactcaaactacaagcagttaattttatccatcacccaaaattcttgatgcaaattattactttctgttcctcatttcaatgggtcaatgttctctttttttggttacacttcttctgc

SEQ ID NO: 91269 - DNA, 225 bp, Glycine max
  Clone ID: 700903677H1
ctgaatatggcctgtataccagtgttgttccacctcttatttatgctatgatggggagctcaagagaaattgcaattggacctgtagctgtagtgtcaatactgttagcctctctggtcccaaaagtggaagatcctgttgccaatcctaatgcctatagaaatcttgtctttaccgtgacttttttcactggaatttttcaaactgcatttggtgttttcagat

SEQ ID NO: 91270 - DNA, 76 bp, Glycine max
  Clone ID: 700903678H1
tgaaagtcaaactgtggcataattcaactttttcctctcaccctaggttcgtcttcaacctctccagacaacatac

SEQ ID NO: 91271 - DNA, 87 bp, Glycine max
  Clone ID: 700903681H1
aaagaaagtgagagagaatttcattgaccgccattgaagctttgcttcttctatctctcactcataacaaaattccccacacacatt

SEQ ID NO: 91272 - DNA, 216 bp, Glycine max
  Clone ID: 700903682H1
catatctccaacataaaggaccacctcaccctccccctccattactcccactgcatcttcttcaaattcctgtcctgaagatgacagcaaagtggtatctcattgtgtgtgttgtagcgatctgggccgttgatctgggttcatcatcacaccatgcccgtgccccagcaccagcaccgtcagtggagtgttcaaacctggtattgaccttatcgg

SEQ ID NO: 91273 - DNA, 206 bp, Glycine max
  Clone ID: 700903685H1
gctagcaatattgtgtctgctatctacattgccactggtcaggatcctgcccagaatgtggagagttctcactgcatcaccatgatggaagctatcaatgatggcaaggaccttcacgtttcggtgaccatgccctccattgaggttggtactgttggaggcggcacacaactcgcatctcagtcagcatgtcttaatttacttgg

SEQ ID NO: 91274 - DNA, 208 bp, Glycine max
  Clone ID: 700903686H1
agggtgttgagaaagagtatgttatccttcttgcagcaagagcttctaggactgaaaatcaagatgccatagatgctgcaattgttggcatgcttgctgacccaaaggaggcacgtagtggtgttagggaggtacatttccttccattcaatcctgtagacaagaggactgcactgacctacattgattctgatggaaattggcatag

SEQ ID NO: 91275 - DNA, 211 bp, Glycine max
  Clone ID: 700903687H1
gaaatattaggtggaagagaaggaagcgaacgaaatggtgggcattgtcactgccactttgatttgattcgtgtgcacatataaggtggggcatggcctacaccctttccaacactctcccactctcactcgccttcttcccagaccgcaccctccttcatccaccctccacacacctcttcctcggtcgccccctcagattcaaaagtct

SEQ ID NO: 91276 - DNA, 111 bp, Glycine max
  Clone ID: 700903688H1
gtcttaactcaacaaccgaacttgatagatactgtgagtgtttttgttcctcaatcaatctaattgtcccatttctcttccaatggcgtcttctctttccacacaacatac

SEQ ID NO: 91277 - DNA, 215 bp, Glycine max
  Clone ID: 700903689H1
aagatttcagcaataaaagatattataccactgttggagaaaaccactcagttgagatctcctttgcttatcattgctgaggatgtcactggtgaggctttggccacccttgttgtgaataagctacgtggtatccttaacgttgctgccatcaaagctcctggctttggtgagcggcgaaaggccctgcttcaagacattgctatattgactgg

SEQ ID NO: 91278 - DNA, 222 bp, Glycine max
  Clone ID: 700903691H1
cagcattcagcatcgcttttttctattcaacgactccgttccgttctctttcttcttcttcgaaaccctaataagcttctgcacttccttctgattccacttttggtaatataggcccctcctcttcttctcagatctgaaactacttgttttaactttttctattcaacgactccgttccgttctctttcttcttcttcgaaaccctaataagcttctgca

SEQ ID NO: 91279 - DNA, 225 bp, Glycine max
  Clone ID: 700903692H1
gccttctttctttttttcaatttccaaatcacgaaactcaagaagatggagaaagcgatcaacagacagaagattttgcttcatcatctcaacccttcatcatccacccaccccaacgaagaatactccctccatgcttcagcatgtgtggcgggggatagcgctgcttatcaaaggacatcgacattcggggacgatgttgtgatcgtggctgcttatcggact

SEQ ID NO: 91280 - DNA, 234 bp, Glycine max
  Clone ID: 700903694H1
gagagcagagctgaggctcttggaacctaaccttctctaagatcctgttttccatctggtaaaaagaaaaagaaaagtggattagcttatcagtctagcatgaatctgactaaactcatcacagattctgtcgtgcatttatctcacgtattagaggatgttttgacatggataactgaatggaacaaaagacctgaagatgagcatttggagaatattcttttacttcttcgg

SEQ ID NO: 91281 - DNA, 249 bp, Glycine max
  Clone ID: 700902901H1
caaaagctcatggtggtttctctgtgtttgctggtgttggagaacgaacccgagagggtaatgacttgtacagagaaatgattgagagtggtgtcattaagcttgatgataagcagagtgaaagcaagtgtgctcttgtgtatggtcaaatgaatgagccccctggtgcccgtgcccgtgttggtcttactgggcttactgtggctgaacacttccgtgatgctgaagggcaagatgtgcttcttttcg

SEQ ID NO: 91282 - DNA, 242 bp, Glycine max
  Clone ID: 700902906H1
gcgacgctctctacacgctgaaacggatcctctcggaccctgacaacgtcctccagagctgggatcccactctcgttagtccctgtacttggttccacgtcacctgcaacctggacaaccgagtcactcgagtggatcttggtaactctaacctatctggacatttggtacctgaacttgggaagctggagcatctacagtatcttgagttgtacaaaaacaacattcaaggaactattcct

SEQ ID NO: 91283 - DNA, 241 bp, Glycine max
  Clone ID: 700902907H1
tagatggcaatttcttaccaaattagaaattctggtgtcttctttttcctttgtgttcttctctttggtgtgtctgatctgggtcgaccagccacttttctgcaagactttcatgtcacgtggtctgactcccacatcaagcaacttctgcaaggcagggcaagccaactcagacttgaccagagctctggatgtggatatgcttccaaggtgaagtacatgtttcgggcgtgttagcatg

SEQ ID NO: 91284 - DNA, 230 bp, Glycine max
  Clone ID: 700902908H1
ttcggacaggaacaggatcaacatagctgccagtgctcagaaagtcgatgtcgataaccgaatctccctccgattctactaccgcatcgctgccaacatcctccgacaggctgatatctttcgtgcagagaagaatattattgacctatatgtcatgcttttaagattttctagtttggtgtctgagacaataccacgccaccgagacttcagatcatctccacacagga

SEQ ID NO: 91285 - DNA, 243 bp, Glycine max
  unsure (1)..(243): unsure at all n locations
  Clone ID: 700902910H1
gtacacccctgaccccttgatttctctcagttccgttctgcatcatagagtaaggccanccacgatcttcgattcttcnanttgaacacaagcgctaagataccttccgttggtttgggaacgtggctcgctgaatctggcgttgttgctcgcgccttggtcactgcaataaacgttggatatcggcatatagattgtgcgcaaatttatggcaatgaaaaggagattggtgctgccttgaag

SEQ ID NO: 91286 - DNA, 254 bp, Glycine max
  Clone ID: 700902917H1
tctgaattctgctcgagggaaacgtgcacttgttagccgcatgcttcagtatgttcttgaccatgttgtgttgcaaatcccatttcctgacattgtcataaaacgaactttggaaggcaaaccctatttggattattatgataaatttgatcttagattcccaaattttaatttcaatgtatctcatcatggtgactatgtggccatagcatctgaacctgtatgtcttgtgggggtagacattgtctcctatg

SEQ ID NO: 91287 - DNA, 206 bp, Glycine max
  Clone ID: 700902922H1
cttcccaaaagtttaatcctgaaacctaaggtctggtcataaatctatacattgttgtaagaacatgtgcatttcaaatgtcacatgagtttgttcctttcgagatttgttgcttggttgaagattggagactggaagatagcatgccacatgttctttcttggtgtgttaaatggttatagtaaatgaattaaattattcttgtt

SEQ ID NO: 91288 - DNA, 240 bp, Glycine max
  Clone ID: 700902923H1
cagcgttcatctcaatctagatttgtgtgcggtgcgtctccggtgaagagaagaagattgcgaccgtaccaggacagctcatatgggaggtcgtaaagaagaacaactctttcttggtgaaagagttcggaaggggcactcagagcgtgcagttcagcagagagcccaacaatctctacaacctcaacactttcaagtactccggtttggcgaacaagaaaactgtcactgttcaacctg

SEQ ID NO: 91289 - DNA, 243 bp, Glycine max
  Clone ID: 700902925H1
ctcgaagtcttgagcactaagtggttgaggaaatgggaacccttgggagagcgatctacagcgttggtaactggattcgagggactggacaggccattgagtgtctcggttccctcctccagggcggttactacggccaagagcagctgtctaggcatcgaactctgatggacatatttgataaggctcctgttgttgatgaggatgtatttgttgcgcctagtgcctccgtcattggagacg

SEQ ID NO: 91290 - DNA, 240 bp, Glycine max
  unsure (1)..(240): unsure at all n locations
  Clone ID: 700902929H1
ctaaaatacgtaaccaggcgtctcacagtcgccgtcctgtcaagagcgctaatgaacgttctcattaccacgcangagtaccgggagccctgaaccgcccgctgctcggcggatcccagctgcggtggcgacggcgggaaggcgctttccgctgttcctcagcgggccgggcccttgaccagcgcggcccgcaggtcttccttctcgccgtcttgcagttgaagagctacatacgtagtc

SEQ ID NO: 91291 - DNA, 230 bp, Glycine max
  Clone ID: 700902930H1
gaatagattcataaaatgtttcaaagggatccttactagctgcacttggtgaatgctcaaaggatgatgatgaagtaattactagtagaaatttttggaatggagctaaggtgccaataaggagtattagtgatcgttatgggtttattagcctttatgcctcttgcaagagaacttgttctgattctgtatcataagttgaccttccaatttttttaagaagcacctgt

SEQ ID NO: 91292 - DNA, 246 bp, Glycine max
  Clone ID: 700902931H1
acgagatcgagagccccaagaagctaggctacgtcaagattcctgccaccgagaccaccgctgctgtctccaccgctccggcgccggccaagggctcggtatgagaatgtgtcctccgtaaccgtatggttttctatgttgattgttaataattattataggtgaattgaatagtgaaaagatcaaatggtgcaaactttggccctgtatctgcgtttatgtttactttttaatttgatgtatttg

SEQ ID NO: 91293 - DNA, 247 bp, Glycine max
  Clone ID: 700902932H1
gttgaagaacaatctgatagcaaaagccttataagtgaagagagtggctcattccttggcctggatgatgttagcatgtctgagatttattcttgttctctttcaattcctgcaagttacctcatcgagatatttagcgggggtgagttggaccgtcgggtcatggaaaagcttggttatcttaattattcttatactccttgggtatctgagaaccatgatatctctgagagagcagtatattaca

SEQ ID NO: 91294 - DNA, 239 bp, Glycine max
  Clone ID: 700902936H1
aaaagtttatttcctctgatcgtgtggtttctgagttctaagcactcacctctttcatacacgtttgttcgcttgttgagaagccatgggcgaggatttcgagttcccaagtgctagcaacatggaaatgcctgaggaggaagagtttgagagtccgatcctgaaggttggggaggagaaggagattgggaaaatggggctgaagaagaaattgctcaaggaaggtgaaggttgggaca

SEQ ID NO: 91295 - DNA, 230 bp, Glycine max
  Clone ID: 700902941H1
caacctaggaatggaaattcttgcttcctatgtttcagtagacggtcggtcatctgtgatgtgtatacacatctaaactaggaatgtaggtcatccatatgccatgcatagtagtgttaatctccaagagagtttctacctagaagtgggtacaccagcttacaatgtaacactatacggtcggtcatatatgattggagtatttatttaaatttgaatgtgattcgatc

SEQ ID NO: 91296 - DNA, 229 bp, Glycine max
  unsure (1)..(229): unsure at all n locations
  Clone ID: 700902943H1
gtcgatctgagctcaaaacaatggcgaaaccaaggtactctcgtcttccacctcgcacgtcatcctcgtcttccacgctgaatacgacacacgaannnggtcttnancttcctcgnnntaattctcctggctctcggcatcctctccattcctagctcctcgcgtggaaatttgcccaaactaggcgatctcgcatccattgctcgcaacacaatccacacttcatacg

SEQ ID NO: 91297 - DNA, 227 bp, Glycine max
  Clone ID: 700902950H1
gaagaaacttcaaatgtgacttgtattttcaaagcaattaatgattatgaaattaaaagtgtaatttttttttttgataaaatcttattaatatacgctcatcattagattagatagtgtaaaaaaaaaaaaaaaaaaaaaaaaaaaaaaaaaaaaggggggcccccgtaaaggaacccgttccaccgggaatttattccgggacgggaacggagggggtgacggtt

SEQ ID NO: 91298 - DNA, 237 bp, Glycine max
  Clone ID: 700902953H1
agagagaacttgctctgctctctctttgctttgctgcttctccctataatctctctgcaaacttgttcagcaagaaaccactttagaaatagcataaagttgggttatttcaagcttctgattccaggacgacaacaacaacaacaacaacaaaaagaagtgattgatttgtgatggaagataaatatagtctaggcaggcagcatagtgggatatggaagtccttgagagatggag

SEQ ID NO: 91299 - DNA, 236 bp, Glycine max
  Clone ID: 700902958H1
tcttcttggaaatgaagctgatattgtttcaaatgggataacacgaattgaccacagcagtcttagtggtgttgggaactctactagaaatctgcctgctactgagatgccagaacaaggtaaacaggctcaggttattcatggtttgccagattttgctgatgtttacagcttcattggaagtgtttatgatccagacacagtaggagtcttccagaagctgaaggatattgatc

SEQ ID NO: 91300 - DNA, 229 bp, Glycine max
  Clone ID: 700902959H1
ctgatgatctgcacaaacataaatgctgagcccatgcaaccgatggtggaacttcactcactgcaatagcaaaatgtatatttttgtattatccacgtatgaatatgtactaacattttcctttgttaacatgttttcttatttacccctccccctccaacccataagtgggcttctctttctacatgtgtaacttttagtggttaaagaaaatatttcttttcctttt

SEQ ID NO: 91301 - DNA, 119 bp, Glycine max
  Clone ID: 700902964H1
cagaagcttgtgatcaatcatcaacacagagctgagtgtgttgctctgtgaatccaccttcttcttccattggaggaccattttctcctggaatagaaatactaccacacaacatacga

SEQ ID NO: 91302 - DNA, 235 bp, Glycine max
  Clone ID: 700902966H1
aattgctgcagtccctaaacaacgacaaactcttatgtctagtaaatgatcagcttcatcaagcaccaagaccttcacacccatcagcctagttgcaaaaccagcagtattctcagtatgatctcttagccttccaggagtagcaacaaggatctggcaagggtttgcctgcatccgtttctgctctaaagcaagtcttgtccctccaatcacgacttgtacaccaatggttggt

SEQ ID NO: 91303 - DNA, 237 bp, Glycine max
  Clone ID: 700902974H1
agtaaacataggatccacactacattcgatattaatacttttgtttctatttctctggaggcagctagctagggtcaatctcatggggatcttgaaaggagacagtggacatgccaatggcgaaaatcttaccgaagctcttttgccaacacgagatgcacaacaacaacatcaaacagacgtcgtggaacaaagatttggtgacaagctctggcttgaaaccaggaagttatggct

SEQ ID NO: 91304 - DNA, 235 bp, Glycine max
  Clone ID: 700902977H1
gtggtttcagtgagtgatcggtgttcacttgatccttcataagtcgtcatcatcatcatcatcatcaccgttgattgaagaagatgccgatcagaaacatcgccatcggaaggcctgaagaggctactcaccccgacacgttgaaggcggggttggctgagttcatctccaccttgatcttcgtgttcgccggttcaggttccggcatcgcctacaacaagctcaccgacaacgg

SEQ ID NO: 91305 - DNA, 238 bp, Glycine max
  Clone ID: 700902981H1
cgcaacaaaaagaaagaatcccaggcgaggagaaacatggaggggaaggagcaggatgtgtcgttgggagcgaacaagttccccgagagacagccgattgggacggcggcgcagagccaagacgacggcaaggactaccaggagccggcgccggcgccgctggttgacccgacggagtttacgtcatggtcgttttacgcagcagggatagcagagtttgtggccacttttctgtttc

SEQ ID NO: 91306 - DNA, 233 bp, Glycine max
  Clone ID: 700902982H1
tagcagactctgctgcagtgagtcgtcgatgcagagtacctcaaggaggtcgacaaggctcgccgcgatctccgcgcactcatcgctaccaggaactgcgctcctctcatgctccgattagcctggcacgatgccggaacttacgatgctaagaccaagaccggtggacctaacggttcgatccggaacgaggaagagtattctcacggagccaataatggcttgaagaaagc

SEQ ID NO: 91307 - DNA, 233 bp, Glycine max
  Clone ID: 700902986H1
gatctatatatgcatgaacactaataatagaagtctaactataatttttattatttggccaaatgaacatgaccaaagaattagctaaaacaatgccccagctagattagattggttatatcctgtattatataattcaattaaacagatttattattcaagagaaaatcagcatttcttctacagtactgagatttcctccaagagtattttatatataaatcaacattttg

SEQ ID NO: 91308 - DNA, 223 bp, Glycine max
  Clone ID: 700902987H1
taaagccactaccttcattgaaaaaatacaagcttcagatggatcatggtatggttcttggggagtttgcttcacttacggtgcttggtttggggtaagaggtctgattgctgctggaaggagtttcagtaattgctcaagcatccgtaaagcttgtgaatttctgctgtccaagcagcttccttctggtggctggggagcgagttatctgtcctgtcaaaac

SEQ ID NO: 91309 - DNA, 231 bp, Glycine max
  unsure (1)..(231): unsure at all n locations
  Clone ID: 700902990H1
cgaaggnaacgctgtcgttgcgccaatcgcggcgttgttgttggtggtgctactcgcggcgagtgtggtggtggaggctcaggagaactcggacgtgaagacgctggtgaagcacatgcacgggaagaagtactgcgacaaaggatgggaatgtaagggctggtcaattactgttgtaacctcactattactgaatatttccagacctaccagttcgagaatctcttctcc

SEQ ID NO: 91310 - DNA, 237 bp, Glycine max
  Clone ID: 700902991H1
tggaaaaccctagttcgcttgcagtcacacaagaggccaatcctattcatagctcgagatgggtgaagaagtgaaggtagttgttccagaatcagtgttgaagaagcgcaagagggaggaggaatgggcgttggccaagaagcaagaactcgatgctgccaagaagaagagagccgagagccgcaaactcatctacaacagagctaagcagtacgctaaggagtacgatcaccagga

SEQ ID NO: 91311 - DNA, 235 bp, Glycine max
  Clone ID: 700902993H1
cacaacaaaaaaagacaacacagagagaagcgtcttaataaacgctcttctctgaaaaacctgatttcttctcttcttctcttctctttcgtttcgatcttcgatctctgaaaatgagagagtgcatttcaatccacatcggtcattttgttattcaggtcggaaacgcctgctgggagctctactgcctcgaacacggcattcagcctgatgggcagatgccaagtgataagac

SEQ ID NO: 91312 - DNA, 237 bp, Glycine max
  Clone ID: 700902994H1
attctatgccctttccccctttttcgtctctagggttactgcaactgctacaagaagaagcttccgcaatggagcgagaccgcgtcgtttcacagccagttgcggttatcgcttgcatcgcaatggccgtgttctacgtggccatcctctacgctcccaccgtgctccttcgtctcccacctcctccttccttcaaaacctacatgcttcgtcgcttcctatgcgccgtcgtttcgt

SEQ ID NO: 91313 - DNA, 238 bp, Glycine max
  Clone ID: 700902995H1
ctctcacacacactttctctctctctctctctcacccagatcttgtagcaatggcgagcgctcccactccacgcgaagagttcgtgtacatggcgaactggcggacaggccgagcgctacgaggagatggtggagttcatggagaaggtctccgcctccgccgagagcgaggagctgaccgtggaggagcgtaacctcctctccgtcgcctacaagaacgtgatcggcgctcgccgcg

SEQ ID NO: 91314 - DNA, 241 bp, Glycine max
  Clone ID: 700902996H1
ccggaccagcagaggctgatttttgctggcaagcagctcgaggatggaaggaccctcgctgactacaacatccagaaggaatcaacccttcaccttgtcctccgtctccgtggggggctttaagctcgttgtgtaatgttggatgtgttcccaaaacatttgaagaactttgatgtttaatgggtctgtaataatgtcccttgaaaataagttcggtttgtgttgaactcaattgtgtccc

SEQ ID NO: 91315 - DNA, 265 bp, Glycine max
  Clone ID: 700903001H1
agcatgtccatcaccaccttccttctcctcctcctcctctcgccggcgatcaccgccaccccgacggcgtacgagatgctggagagctttcactttccggcgggtattctccccaagggagtgaccggttacgagctggatccgtccagcggcaaattcagcgccgatctgaacggttcgtgcagtttctccctcgaaggttcgtaccagttgagctaccagaaaaccatcaccggctacgtatccgaagaaggctcaccgaact

SEQ ID NO: 91316 - DNA, 240 bp, Glycine max
  Clone ID: 700903009H1
aaacaataaaataaaataaaacagaagagaaggaaacagaagtagaaaaaaaataaaatgggttacacaagatcttctactctgtccgtggctcttgtcttggcattctgttcaagcattcagggtttggacatcaccaaattgttgggcgaatatcccgaatatgcacagttcaacaaatacctaactgaaaccaagctggcggaccaaatcaacagccgtaacgccttacagtccttg

SEQ ID NO: 91317 - DNA, 234 bp, Glycine max
  Clone ID: 700903010H1
gtgatttcagtgagtgatcggtgttcacttgatctcatcataatcgtcagcgtcaattgaagaagatgccgatcagaaacatcgccgtcggaaggcctgaagaggcgactcaccccgacacgttgaaggcggctttggctgagttcatctcaaccttcatcttcgtgttcgccggctcaggctccggcatcgcctacaacaagctcaccgacaacggcgctgcacccctgccgg

SEQ ID NO: 91318 - DNA, 235 bp, Glycine max
  Clone ID: 700903011H1
ctctcactcacaaacacacactgtactaaacctaatcagcagagacatggttgagcaaaccttcatcatgatcaagcctgatggcgtccaaagaggccttattggcgagatcattagcagatttgagaagaaaggtttctacttgaaaggtttgaaacttgttactgtggaccgtccttttgctgagaagcactatgctgatttgtctgccaagcctttcttagtggtttggtgg

SEQ ID NO: 91319 - DNA, 233 bp, Glycine max
  unsure (1)..(233): unsure at all n locations
  Clone ID: 700903012H1
gtccgtttcagacgcgtgggcacccgaacaggtgtttcccatttcctcaattcaccgtttggacgaaaagccttcggtgaggggtattctctcggacttgacttgtgacagcgacgggaagattgacaagttcatcaacggagagtccctngtggcgcttcatgagatggaatgaggaagaacttactatctgggaatgtttttgggtggggcttacgaggagcgctcggtgg

SEQ ID NO: 91320 - DNA, 209 bp, Glycine max
  Clone ID: 700903022H1
tgtagctcctgagctttgaatttggttgtttagttagcaattgctacatgggtaataaatgccagaatatgcatggaccatataattaacttgcatactggggttgtgtttatccatttcatttgctgaatgtataatgatcaattgagtgtgaaactgaacgcccgttgattatacttatgatattctatttgattcacaattaagaa

SEQ ID NO: 91321 - DNA, 123 bp, Glycine max
  Clone ID: 700903024H1
atagaatctccttatggttggtagctatggtgtcagtggtcatttgggaacaatgtcaaagacatgggacccattgccattgtcactataatgatatagtgattttggtgtccacacaacata

SEQ ID NO: 91322 - DNA, 192 bp, Glycine max
  Clone ID: 700903027H1
cgaagatggcaatagaattggcatctcccaattgggttccaaccgcagtcgcatgtgtggcagccttggccgccctcctcctcttcctcctccgcggtctccgccgccgtaaatacaatctccccccaggccccaagccctggcccatcataggcaacctaaacttaatcggctcccttccacacaacatac

SEQ ID NO: 91323 - DNA, 86 bp, Glycine max
  Clone ID: 700903032H1
ctccaattacctccagaaaattgactccctggctttgacttgcctattctgcgacaaatggcaagagtcactaattgggtgtgtgt

SEQ ID NO: 91324 - DNA, 245 bp, Glycine max
  Clone ID: 700903037H1
ggcatattgatgatgttagagactgcttagaagagactggggtcgacggggttctttccgctgagaccctgctagaaaatccagctctctttgctggatttcgaactgctgagtgggtgtctgaaagtgaaggtaccaatgtggatggaaagctggaccaggcagatctgctaatagagtatttgaagctttgtgaaaaataccctgttccgtggagaatgattcgttccatgttcataaattgt

SEQ ID NO: 91325 - DNA, 239 bp, Glycine max
  Clone ID: 700903039H1
gcatattccaattcccaattcccaattctaaacccttattcctttcaaagaaccaaattgagtgatcgtgatggcaccaaaggcagataagaagccagcggagtagaagcccgcggaggagaagaagtcgacggtgggagacaaggctccggcggagaagaagccaaaggccggaaagaagcttccgaaggagggaggcgccggcggagaagggaagaagaagaaagatacaagaatag

SEQ ID NO: 91326 - DNA, 228 bp, Glycine max
  Clone ID: 700903040H1
aattctgctcgaggtgctgtttatttgaaattaacaagtagcacagatgtttggaatcatcggaggaaacaagggtcacaagataaatgggaacttggtgattatgcgaaagaatgtgtttgatatcaacagcattatcagtgttaagggtgtcatcggaaccggcattaacatcattggatgagtcgtctgtaccgtttctgcgttggcgtcccacatctccatcca

SEQ ID NO: 91327 - DNA, 71 bp, Glycine max
  Clone ID: 700903056H1
tcctcattgaccaggcagacccaaacttgacccaaaaacaccaaccccgcctacaccacaaacctacaaca

SEQ ID NO: 91328 - DNA, 269 bp, Glycine max
  Clone ID: 700903064H1
cggaattcggatcgaggtgatacagcacaagaggaccctcgagaggtgactgctgcaaaggcagacttaaattatattgggttagatggagaaataggctgcatggtgaatggagcagggttagcaatggccacaatggatataattcaattgcatgggggtactcctgtcaattttttggatgtaggtggcaatgcctctgaaggccaggtggttgaggcatttaaaatattgactgctgatgacaaagtgaaggaattgtggttaac

SEQ ID NO: 91329 - DNA, 238 bp, Glycine max
  Clone ID: 700903072H1
agacgggccccattaccattttactgagaagagtataatggagaaagaaatcaaagagggaaagcttcttgagtttgcttccgtccatggtaatctgtatggaacaagtgttgaggctgtcgaactggtatcagatgcagggaaaagatgtattcttgatattgacgttcaaggtgcaagatctgtgagggccagttctcttgaagccatattcatctttatctgtctccatcaatgg

SEQ ID NO: 91330 - DNA, 171 bp, Glycine max
  Clone ID: 700903079H1
cgtggaattctgctcgagacgcatgatatcattcgcctctttgagaagggcaatatagtgtctccattttctatgcatcaacagcagcttggcatgctaggacacacacagtctcttctaattgttgctgcagctagatctactggcggggatcccaggtatcctggtagc

SEQ ID NO: 91331 - DNA, 260 bp, Glycine max
  Clone ID: 700903082H1
gaaattgtcagtatgacgactcaaatcagaacctggagactatgatcagtacagtcattggtcagtatggactcttacctgtttcaggagttatctccaagcttaagtctgagggacatggtcatgtttttacttctgttttctatgcacaatctggcattcaccccatgttgagtccaataccagtctgccagaatgagagttctccctttcgcacaagtagctctttctagtccaatcctgaaatcactgctcagatc

SEQ ID NO: 91332 - DNA, 250 bp, Glycine max
  Clone ID: 700903084H1
tgcaaggcatcaccatttatgctcctgtcacatctccaaacactgatggcattagcccagattcttgcacaaatgtaagaattgaagattgctatatagttgctggggatgactgtgtggcggttaagagtggatgggatgagtatggcataaaatttgggtggcccaccaaacagctagtgataagaaggctaacatggatctcaccatacagtgcaagcattgccttgggaagtgagagtcaggtgga

SEQ ID NO: 91333 - DNA, 174 bp, Glycine max
  Clone ID: 700903086H1
cagagaaaagagcctggtatgtgctttcgtctcgcttccttctcctctatctaccgatgtcctcctcctaggcctggggtactgctctctctctctcttcaccccaatgaatgatcgcgtctctatctcttgctcttgtgcctgcttacttggcataattcgagcaccaacata

SEQ ID NO: 91334 - DNA, 253 bp, Glycine max
  Clone ID: 700903096H1
gtgatacaacacaagaggacgctcgagaggtgactgctgcaaaggcagacttaaattatattgggttagatggagacataggctgcatggtgaatggagcagggttagcaatggccacaatggatataatttaattgcatgggggtactcctgccaattttttggatgtaggtggcaatgcctctgaaggccaggtggttgaggcatttaaaatattgactgctgatgacaaagtgaagcaattttggttaac

SEQ ID NO: 91335 - DNA, 275 bp, Glycine max
  Clone ID: 700903103H1
ctctatactcgtattgcattgggaaaggctaagaggatggatgttgtgtggggggaaacagctggtgtggatggccaactgtggttattgtgtcccatacttttcacgttgcagggatttgaggcatatgttggactgttgttgctcaggactgcagttgttggggttgtttctgagtggcaggtaatattttgcggtgtcctgttggtcttaatggctgttgggaactttgcaaatacagtacagactctgatggcaaaatcaagatttaaggc

SEQ ID NO: 91336 - DNA, 70 bp, Glycine max
  Clone ID: 700903104H1
ttcccttttcctcgtttccataaccctcccgaatgcttgagacgcttcccgaatccttccacacaacata

SEQ ID NO: 91337 - DNA, 269 bp, Glycine max
  Clone ID: 700903106H1
ctgagcttggcgaatgtgaaacttggaagcagaaaccttagggtttgtgcctcaactgtgcctctctcaggggtgattttcgaaccattcgaggaggttaagaagggtgaacttgctgttccaacggctccccaagtctcgcttgctcgtcagaactacgctgacgagtgtgaatctgccattaatgagcagataaatgtggaatacaatgcttcctatgcgtaccactccttgtctgcatactttgacagggacaacgtggctctcaa

SEQ ID NO: 91338 - DNA, 269 bp, Glycine max
  Clone ID: 700903108H1
ctgattttgaaaactggaacgcgtaaaatgaacggtacccctccctcataaataaaatctactactaaacgctcttctcttctgcaatcaatttgcaaaccaaacacaacacaaggagaagaaccagatctctctttctcaaatcaccaagaatagttgaaaatggggctgtctttcacgaagctgttcagccggctctttgcgaagaaggagatgcgtattcttatggtgggtctcgacgccgccggtaaaaccaccattctctacaa

SEQ ID NO: 91339 - DNA, 265 bp, Glycine max
  Clone ID: 700903110H1
gaaaaaagtagaagaagaagaaaagaaagaagaagagaaaaaatcagatgagaagaaattcaaggagaaatctgcgccgccagaaatcgtgcttaaagtgttcatgcattgtgaaggttgtgctcgcaaggttcgtcgctccctcaaaggattcccaggggtcgaagatatactcacagattgtaagtctcacaaggtggtcgtgaaaggagaaaaagcggatccgctgaaggttctagagagagtacagaggaaaagccataga

SEQ ID NO: 91340 - DNA, 265 bp, Glycine max
  Clone ID: 700903111H1
ggaattcagctcgagtttgctttgactatatttcataggctcctttgtgattaagaaaatgtggacgagaacgggttttgaagaagcagcagtttcattgatcaactcagatttcagggacctaagtctagctgctaatcgactcgcccatcatgacatcaaacgtggtggcattggctttggagcctctttattcggattgtttgctgccattgctgctatttatctgttgctattggctcgtacaaactggaaaacagtcttc

SEQ ID NO: 91341 - DNA, 265 bp, Glycine max
  Clone ID: 700903112H1
catcccacgtttcctctgtcacgagagactgcgcagaacctaaccctcacgaaaacccctttcgattccgataactctcgttgttccgaaaccctaaccttaaccgggttttctcgttggttgggattgaattggcatcggagggaggcgatcgattggaaaattggtagtagtagtttagcgttgaagaacgatgtctgctgctgtgtgcggaagcgagagatctttcttcgaagagcttcctccttctccgccactctccaag

SEQ ID NO: 91342 - DNA, 266 bp, Glycine max
  Clone ID: 700903114H1
ggcgaaggcgatagagaggtttggtgaagtgtatgagagaatggaggcgcagaagctgaggcagatggtggatttggagaaacagaggatgcagtttgctaaagatcttgaagtgcagaggatggagatgtttatggacacacaggttcagctcgagagaatcaagcgcgggaaaagatctggctctaacgatatgtatagctagccaagtgggcgatggttcgttgacggtgcttgaaatgctgtcttgctttggtgagaaagta

SEQ ID NO: 91343 - DNA, 123 bp, Glycine max
  Clone ID: 700903115H1
ttgcagctggctatcaggggagatgaggagctggacactcttatcaaagggaccattgctggtggtggtgtcattcctcacattcacaagtccttagatcaacaaataccgccaaggggattg

SEQ ID NO: 91344 - DNA, 228 bp, Glycine max
  unsure (1)..(228): unsure at all n locations
  Clone ID: 700903117H1
ggcaacccaacatttgaagatttgaacctgccattattgtaagtaagaattgggaaaggaaggaaggagatgaatctccctatcatagatctgtcctcacctgatcctctttccactgccatttccatgtatcangcgngctttgagtatggantcgtttaccttgtgaaccatggcgtggagaatgacttggtcaaagcctttgatgagagtaagaggttcttctca

SEQ ID NO: 91345 - DNA, 136 bp, Glycine max
  Clone ID: 700903121H1
caacacactatgaagtttgtgttgatctctttcatttgataaggctgtttcaatattgtgtagctccatgttcaattcagagatcaacacactatgaagtttgtgacatacaaaaaacaaaaagaaaaaaaaaaga

SEQ ID NO: 91346 - DNA, 267 bp, Glycine max
  unsure (1)..(267): unsure at all n locations
  Clone ID: 700903123H1
aaagttccgacttgacccaaactcaagttccgagttccctccgctatctgcgatcctagtcctacactctccgctctagntcgaaccttggcgtcgtcaccgacgcgaggacttctagaaggaagaaatttgaagacagatgggagagaggaaggtgttgaacaagtattacccaccggactttgatccctccaagcttcccagagcaagaaggccaaagaaccagcagatcaaggtccgcatgatgcttccgatgagcattcgatg

SEQ ID NO: 91347 - DNA, 262 bp, Glycine max
  Clone ID: 700903125H1
aaccctttcaaagaaggaactcgatacatcgtctgtggggtatcagcctccactaccagctgaccaggtgaaggctgctacagattttgattatgaaggagagggttcacctaatggtcgtgttcgtggtcgtggtggccgaggcaggggaaggggcagaggtaatggctttatttcagctgcttatgaggatggaggttgggatcgcaataggggaaatgctacgggcaggggtagaggaagaggacgtggctttcgtggt

SEQ ID NO: 91348 - DNA, 260 bp, Glycine max
  Clone ID: 700903127H1
aaagagaccccactttgtatgttcagatacattgcacttgggaacgttcccattcagtgcactcgtatctgtttgcaataaaacgacctctctttcactaccccaagaccttcatttctctttccaccactttctctctgtctctctgttttttttttgccctatctcatagggtttcctccttctctccctctcttccatgcatttttgctctgacgagttcttcttcttcgttgccctcttcttcgctgtctttgaag

SEQ ID NO: 91349 - DNA, 265 bp, Glycine max
  Clone ID: 700903128H1
aaataaatagagagttggttaaaagtaggaaatgaaagtgagggagagagaatggaggaagaggcagggatctaccgtctagcggaggacagcctccggcagatattctgcaggctgccactgagggaaataatgatatgccgctcagtgtcaaaattcttcctgcagctgctctcaacaccttcgttcctccaggtcctctccagctcccatccacccctccagctcctggccctccgcaaccgccaccacaccccttctcaca

SEQ ID NO: 91350 - DNA, 268 bp, Glycine max
  Clone ID: 700903131H1
aaccctttcaaagaaggaactcgatacatcgtctgtggggtatcagcctccactaccagctgaccaggtgaaggctgctacagattttgattatgaaggagagggttcacctaatggtcgtgttcgtggtcgtggtggccgaggcaggggaaggggcagaggtaatggctttatttcagctgattatgaggatggaggttgggatcgcactaggggacatgctaggggcaggggtagaggaagaggacgtggctttcgtggtcgtgga

SEQ ID NO: 91351 - DNA, 182 bp, Glycine max
  Clone ID: 700903134H1
attgacggcgcaccgacctacattccactctatctgagtaagctcaaagggtacacccgacctacaggctgcaaggcagtagcagagtccataagaactgtccatcataaatttcactacactgttcaggatggcctagatgccatccagatgtgatctatcacttgaaccatatgctgtga

SEQ ID NO: 91352 - DNA, 269 bp, Glycine max
  Clone ID: 700903135H1
gaaatgttgaagctcaagttcctggtacctatcttcttgcattcaagaaaagagttagctgaatgttttggtggggctgaattctgtaggtttaaaatctcggtttattttcaaggctgtagattccaatttttattatctttgctggcgccttaagataagttaaccctttgaagatgtttcgttgtttacttggttggcaaagttcagaattgtacatttgtagggctggatgtggaggggactccttactttttgttttattatta

SEQ ID NO: 91353 - DNA, 216 bp, Glycine max
  Clone ID: 700903142H1
tgcggagattaatattttatctaggtccatcgtcgatagaagatacgacttcccaaaggcaatgtttcagtgggactagagctatgggcattctaacttcgctcgggctgtggcagaaggcggccaagatcttattcttgggcctcaataacgctggcacaactacactgcttcacatgaccaaagatgagagattagtccagcatcagcctaccc

SEQ ID NO: 91354 - DNA, 266 bp, Glycine max
  Clone ID: 700903149H1
tgtcaaatctgtatgagtacgcaaagcagaattctgggcctttgagatccgtcgtaggaacggttgagaacactgtaaccaccattctcggtcctgtctgcaacaaattcaaggacgtcccatatgatgtccttgtttttgttgacaaaaaggtggatgaagcttcccacaagttcgatgagcatgctcctccttttgctaaacacattgcggatcaagccaagggtgtgattcagaaagtgacttgtgaggcagggaaagtagca

SEQ ID NO: 91355 - DNA, 62 bp, Glycine max
  Clone ID: 700903150H1
ggagatcgtgtgtagatcaacagctttggtttgatggttaaggaacctattgattctgctga

SEQ ID NO: 91356 - DNA, 260 bp, Glycine max
  Clone ID: 700903157H1
gtacttttaaaattataagtaaatgtatcacaggtaaaggtttttcagggacaaaacggtactttggtgatttagggaaaactttgagatcagctggctccaatatagcttttgcagttgtagctgaaatatcggattctgttctgaaaggtgcagaggcgaatggtttcaatggattggtgagtggctttcaccaaggaattctaaaattggctatggagccatcagttctgggaactgcattgatggaaggtggtcca

SEQ ID NO: 91357 - DNA, 58 bp, Glycine max
  Clone ID: 700903158H1
ttctctctcatcggtcgcggttccttcgcacataatcgctggacttccgctatttcca

SEQ ID NO: 91358 - DNA, 262 bp, Glycine max
  Clone ID: 700903162H1
cttactgataaattgggattagggtccaaattctacataataggtttctttttgggtggccaggttgtttggaggtgccttaagtatatccctcacaggctggcaggtgcagtgctcatagccccagttctcaattactggtgggctggtcttcctgcaaacttaactaatgaagttttctaccaacaaaaactacaagaccagtggacagttcgtgtggctcactacataccatggctaacttactggtggaacactcaaa

SEQ ID NO: 91359 - DNA, 266 bp, Glycine max
  Clone ID: 700903165H1
aacacaaacacatacattgtagtatcacttttgtctcggaatttgttcttttgagttatggcaagcttaaaggttgcatgtgtggttttgatgtgcatggctgtgatgagtgcaccaatgatggtgcaagccgtgtcatgcaatgatgtttctgtgaacctagcaccgtgcctatcttacctgatgcagggtggagatgttccagaatcgtgctgtaacggagtgaggaacattctgggttctgccagcaccacctttgacaaaca

SEQ ID NO: 91360 - DNA, 262 bp, Glycine max
  Clone ID: 700903169H1
aaacaaaaacccttgcacaatatggccctaaacttggagtgtgtcgtgtggtgtgagacagtgtaactcggaagcgcacagcaatggcaagagcgactctccttcacttgctgcggtcacagagcctccgccacgtgtccaaaaacgctccttcagcatatcgttgttttgggtcctctacctgtcaacgacccattagccccaatccatcattcaaaacttcctcccatcttgctattttccaaagaagatgggcatcaca

SEQ ID NO: 91361 - DNA, 261 bp, Glycine max
  Clone ID: 700903170H1
ctattgctaacttaactctcaagcttagtactgaatgaagtttattctttctctaatgagtatcatactttataccctctttatctcttctcttgtagtttccatagcagccgacaaacaatccaattcacagtttcagtccctcagtcatgaagaaaccatagtttccccaaatggagtctttgaacttggttttttccctctgggaaattccaacaaaagctacctcgcaattcggtacaagaactattcggatgaaac

SEQ ID NO: 91362 - DNA, 258 bp, Glycine max
  Clone ID: 700903172H1
attcgaggtcagaagttcgatgagaaggaaaacattgtgttcatcacagtggtgtgttgtagccccgagaagataagagacaagctttgctacaaaggtggaggctctatcaagagcattgagatactggaactgcccaagctcaaggccgagaagcctaaagcagaccctcccaaagctgagaagtccaaggccgcgcccgagaaaaagaaggacggtggcggcgagaagtcccaggccgagcccgagaaaaagaag

SEQ ID NO: 91363 - DNA, 256 bp, Glycine max
  Clone ID: 700903173H1
aacaggttgtagaattctaaagctaacctctcgcattttgattcatggtggctgtgagtggtttggcataatggcgaaatggattttcttccccatcatcttctttgttgtatttgttgcaagcaccttcctcctggaaattaacctttccagaataacaagaacttcaattttcaagacaattataatattcaataagcaacaacctcaattcccacttaactgcacggatggaaacttagcaaaaacttgttca

SEQ ID NO: 91364 - DNA, 256 bp, Glycine max
  Clone ID: 700903175H1
aaaagtactgccactgacttgggatcccattgttgtgacaaagactcatcaatggtagcacagatgctggtttcctctaattcatgctcgaaattagaaggtggaatgtttgacaactctatggtatcagaatttgtgctgtatgatcttacacactcaagcaaaagtgtttctcctgaaaaaaagcgttacagcgaccaacactgttctaaaactctaaaagcttctcgtgtaggaatgaagggcgaaactttca

SEQ ID NO: 91365 - DNA, 79 bp, Glycine max
  Clone ID: 700903177H1
ccgaccaaacacagtgttgattcccaaatccccattagttttcaaaataaagactttgcgtggcacccacaagaaggcc

SEQ ID NO: 91366 - DNA, 265 bp, Glycine max
  Clone ID: 700903181H1
ataaaattctgagataagtgattctctgccttttcaattttcattttaaaaaaaagaaagaaaaaaaaaagaaagaaagaaaattgtgcatgctggttcttgaatgatcttcgtcctggattcagaattttcggtgacagatctctgctcggacttccataaatgcatatctgtggatgtgttccaccttggctctgtcagattctcgcttgcatgggggaaaattgatggggctttacagtttgctactctttccttgaattct

SEQ ID NO: 91367 - DNA, 262 bp, Glycine max
  Clone ID: 700903182H1
gtggtgtgacatgttgtcttcgattccctggtcaactcaactcagatcttcgcaaactcgccgtgaatctcattcccttccctcgtctgcacttcttcatggtgggatttgccccactcacttcccgcggttcccaacagtacagggctctcactgtccctgaattgacccaacaaatgtgggatgctaagaacatgatgtgtgcagctgatcctcgccacggtcgttacttgacagcttctgcgatgttccgtggaaagat

SEQ ID NO: 91368 - DNA, 256 bp, Glycine max
  Clone ID: 700903183H1
agaagaagctgcatttgcagagacgcattcgcgtttgtctgagagagagaattggaaggtagcaacgagtgatgatatacatattgtggcggtagtgaaatcgaggaaaaagaggtagcaatcgtgagttgcaatgagtagcgaaaagtctccttcatcagcttctgcttcagcttcttcttcgagtagctacgagttgagcaaaggcatcaatggcctcgacaaggttattcttcgcgacccagtggtagctccg

SEQ ID NO: 91369 - DNA, 131 bp, Glycine max
  Clone ID: 700903185H1
attttacgtgtaatattattcacaaagtctcgcatcaagtcacgtctacccccaagtcctagagccctccctgtgttaggacacctctacctcctcaccaagctcccccaccaagcattccacacaatata

SEQ ID NO: 91370 - DNA, 253 bp, Glycine max
  Clone ID: 700903187H1
ttctaaccactgaactcatctcactacattaatattcccttgggtttcattaattgtgacatttagctttttttattgaaccgtgtcaatggccgctactatgaaggctttagcttttgttgctttgcttgttaccattaatgcaatagtgtgtgaaagtagagtggcgagaaaggaccttggattggaccttggtggggtgggaattggggtgggtgctggggttggactaggccttgctggtgggggtggt

SEQ ID NO: 91371 - DNA, 254 bp, Glycine max
  Clone ID: 700903190H1
tttgttttgttgttaataaaaattttctcttctttctttctctcttgaagttggaaagaaaggcaagtagagaaagagaaaacaaaaaatggtagtttccagggtggttgtttttcttggtctcattcttgcaacccttgtgtcattggcttgctcccaatccgctgctccggctgctgctcccacaagtgatggcacctcaattgaccaaactgtagcgtatatcctaatgttggttgcattggttctgactt

SEQ ID NO: 91372 - DNA, 256 bp, Glycine max
  Clone ID: 700903193H1
tcaagatgaagatgattcgcattcttttcatctttgctcttctatccttcacttcccatgcttctaatgtcaatgacttctgtgtggcagacctgaagggtccagatagccctactggctatcactgcaagccacctaaaacagtaacatcacatgactttgtgttccatttaggccctggaaacacttcaaacgtgttcaagtccgcaataacctctgcatttgtcaaagattttcctgctgtcaacggtcttag

SEQ ID NO: 91373 - DNA, 257 bp, Glycine max
  Clone ID: 700903194H1
cttgtcttctctagctaccttatcatcataaaaacactaaacgcccctctatactctctctaccttctttcttgtatccgtcttaatttctgtcgctatggcttcggatcacaccatgagctttcattcttcttccttacacgaagaggacttcgatgatgatgatgatgatcacctacacccccacccccacaacttgtcgaggctctccgtctgcactagcagcacctttggcgacaacgaccatgttgacaatc

SEQ ID NO: 91374 - DNA, 257 bp, Glycine max
  Clone ID: 700903195H1
atgggacctgccttcagatgagaatgtcatacagtccagcagcacacctgtttctcttttttgtgcaatggacagactgcaatcttgctggagcccttggactgttaagaatcctaatatacaaagtgtatgtggatgggacaactaccatgtctacccttgaaagaaaagcaagtattagggaattctatgcaatcatatatctctctttagtgcaactgcaagaaagtgtggcagatacagaggataaaaaacag

SEQ ID NO: 91375 - DNA, 263 bp, Glycine max
  Clone ID: 700903196H1
ttcttctttttcaatcttttttcttttaacatttgttcttgattaatgaaaacatccttggcaaatgctttcgcagttgttcgtctttcataaatccaagaatttcacctctgactatgaaatacgaatgcccccgactgttcctgttaatcattactccgatcccgatatccaacacaataggatcagaatcgtgtggtgatatcccatgctaatgtatacagagcgtaggcttgctttgagcactctaatttcttcaaagt

SEQ ID NO: 91376 - DNA, 187 bp, Glycine max
  Clone ID: 700903201H1
ctgagctaggagctcagcctataaatttcagaactctccagaactcaatgttctttgcacagtgcaatccaagaacagatagatttgaaccatttcataatctgaagccttgtatttttttgacgagtggagttcaaattagaaggcgtaggggggcgcgggaaaggaccgaaggggcccaccagat

SEQ ID NO: 91377 - DNA, 264 bp, Glycine max
  Clone ID: 700903203H1
atttgcaaattgcaatctttgcttggcccttgagaacgcgctaactgctaagttacgcgagggatgcgcagtgcgcaccctctatcgtctcttcttttttcttcttcttcttcttcttcagagtttagccagttgaattgaactagtaactttcttttaaaattaaaattagaatcattatcgtttatcacactccaacaacgcctttcgctcttaccaccctcgcgggtcattttcttgggaaaactcgtttccaccaagaaa

SEQ ID NO: 91378 - DNA, 68 bp, Glycine max
  Clone ID: 700903205H1
aagaactgaaggtaccgtacgagaacgacaggaatcaaggatgccaaatcgcggcagtgccacacagc

SEQ ID NO: 91379 - DNA, 248 bp, Glycine max
  Clone ID: 700903207H1
gccagaagaacaacatggacattgatcttgcgcctcagttgcccaagaaactttacggtgccaattgtggctccgactacgcatggttgccctccgacctgcccatgctccaccaaggcaacattgatgccgcgaagcttgctctcaacaaaaacgcacttgctcttcctcgttactctgactcttccaaagtcgcttatgggcttcaaggtagtggattggctggaatagtgttgccggaagcagaa

SEQ ID NO: 91380 - DNA, 258 bp, Glycine max
  Clone ID: 700903208H1
gctataaggaaatggaaagtgcatattcctagtgacactaaagaactttatgagcttgatttggaagagtatgccaagagagggagagtcagaattgattccactccaaccttgaggatcctcaacaaggcatgtgtcaacaccgattcaagtactagtggatggaagctaagccctgttacccatgtggaggagaccaaacaaatgctaagaatgatcccaatcttggctgctacattgatccctagtgcaatggtt

SEQ ID NO: 91381 - DNA, 262 bp, Glycine max
  Clone ID: 700903210H1
ctcgctcttcccttcctctggtggcgacaatgtcgactcctgctaggaagaggctgatgagagacttcaagaggctgcaacaagacccgcctgcagggatcagtggtgccccccaggataacaacataatgctgtggaatgctgtcatatttggtcctgatgatactccatgggatggaggcacgttcaagttgacactccaatttactgaggactatccaaataaaccaccgactgtacgatttgtgtctcgcatgtttca

SEQ ID NO: 91382 - DNA, 261 bp, Glycine max
  Clone ID: 700903212H1
cacaaacaaatacattgtagaatcacttttgtctcggaatttgttcttttgagttatgccaagcttaaaggttgcatgtgtggttttgatgtgcatggctgtgatgagtgcaccaatgatggtgcaagccgtgtcatgcaatgatgtttctctgaacctagcaccgtgcctatcttacctgatgcagggtggagatgttccagaatcgtgctgtagcggagtgaggaacattctgggttctgccagcaccacctttgacaa

SEQ ID NO: 91383 - DNA, 217 bp, Glycine max
  Clone ID: 700903214H1
ctgcttcaacctggcggaagaagaagacgccgtagccatgatgaagtactccatacagctcgacaatcgcatcaagtcctgcaagcgtaaggcgctgaccttatagtgcatttcaagaacactagggagactgcctttgccatcaggaattgcccctggttaaagctaaagagacctggagattttggccacaaacagtcatccttccgacgcttct

SEQ ID NO: 91384 - DNA, 265 bp, Glycine max
  unsure (1)..(265): unsure at all n locations
  Clone ID: 700903217H1
cagagatcagattctgattccacacaacatacgatataganatcancnacattctaanccgagtcgantccanangcaaaccgtntttaacatncgacgtcgggaaggcaccgcgatgctaatgtctctggcgacgatgcctttgccagactctacgcctccgtcgacgccgacatcgaggtcctacgtcagaaatcaggaagtgcttccaaggagaaaggtaaggcatcagctgtatcgatcaatgcatagattcgtcgtacta

SEQ ID NO: 91385 - DNA, 96 bp, Glycine max
  Clone ID: 700903218H1
cagagtggtgcagcgcaatggcctgtgaagtagtcacagaccatgcacttctgtcgatgatcaggtgggcagacaacacgtgcctgcaatgaaccc

SEQ ID NO: 91386 - DNA, 261 bp, Glycine max
  Clone ID: 700903221H1
cagcaagtattctaaatgtcttagtcttaagaggggggagaaactggaattcgaatgattctgaatttagtacaagccaatctgcaaagtgagcatgatatataacttgttgtggatttctgcctcatcattgtgcatcatgtgagattaaaatggaagggttgtgtggagattgcttcaatatgattttgcacatgttgtgctgcaggaacttggagcatagcgtgtgctcaaagtgcatagggatggatttggatagca

SEQ ID NO: 91387 - DNA, 260 bp, Glycine max
  unsure (1)..(260): unsure at all n locations
  Clone ID: 700903233H1
gctataagctagtttatcgtgaggagaatatgaagttgtttgttttctttgttgctgcagtagttttggtagcatggccatgccatggcgcaggctaccaaaggttccctctccgaatgaaaactggctatggtgagcgttcttcggaggtaaaatgcgcaagttttaggcttgctgtggaagcacacaacatacgagagaananaaccattcctnaacagtgcgttgaaccaacaaaggactacattaatggcgaacaa

SEQ ID NO: 91388 - DNA, 255 bp, Glycine max
  Clone ID: 700903241H1
caacactttccacttgtctccgaatgagttatcttgagaaacattattcccattgctatatattatggctagcatgaaggttacatgggtggttgtgatcatgtgcatggccgtggtgggtgcaccgatgatggcgcaagccatgacatgcaatgatgtgacggtgaacatggcacagtgcctatcctacctgatgcagggaggaacaccttcaacactttgctgcagcggagtcaagaacattcttggctctgc

SEQ ID NO: 91389 - DNA, 75 bp, Glycine max
  Clone ID: 700903245H1
ctcatcctctctgcaccaaagcaactcacagtaatactactctcaagtgcgctctctatctccacacaacatacg

SEQ ID NO: 91390 - DNA, 253 bp, Glycine max
  Clone ID: 700903258H1
aattcaggtactgcgtttcggaagcagacacagatggctcgtacgaagcaaaccgctcgtaagtccacaggatgaaaggctcctaggaagcagcttgcaaccaaggctgcacgtaagtctgcaccaactactggtggtgtgaagaagccccaccgttaacgtcctggtaccgttgctcttcgtgagattaggaaataccagaagagtaccgagcttttgatccggaagctccccttccagaggctggttcgtg

SEQ ID NO: 91391 - DNA, 250 bp, Glycine max
  Clone ID: 700903262H1
cgacaataatacattgatcctattccatggccacttgccaaaacaaaacattaaaaaaaaggttaagtttcaatgcagtgcatggcaccatttgttgaagctgaggactggccacgcatttgttgtggctgaaaagaaagataataatggtggtggggggttttgggttgtaagtgaccaactttggggtccacgtaaaaattgcatgacagggattggatgtcggttctgttggtgttgttgggtaggg

SEQ ID NO: 91392 - DNA, 257 bp, Glycine max
  Clone ID: 700903265H1
cagttggatgcttcagtccttgaggagtgaagacagcgtgatgccatggctgaggctcgttttaagcgtcatgtggctatgctgaagagagatagggctaaaagattgctatataaagtagatgtagccattcacaaggccatggctgctctaatgactgcagaagcaatgaaagcttctgaggactcccttgttgaaatgaaagcttatgaggactaatctggctattcaaatgacttggcttacttggtcaagag

SEQ ID NO: 91393 - DNA, 254 bp, Glycine max
  Clone ID: 700903266H1
aggattctatggtgccgatgcgctaatgcaatttctgtggtagatgcagactggttaatcagcaaagatcaccagtgttttatttgttaataaatgtgatgctaggagactaacattgaggatttgatggttaaatttcacatatattcaataaccagtagatgttttcattttacaatcaaaatcattgtaacgagtttcactgaattttccactttgcccggaatttttctagtcaattatcattgatgcat

SEQ ID NO: 91394 - DNA, 251 bp, Glycine max
  Clone ID: 700903267H1
agcgagcgagccctcactgtcggccgcgacgagtgcctcgccgtggtgaacctcgtccggaggcgccggaactgctgcctgcgcctaggcaaggaggcgagtctggtcaagtttgatgcctctggggatcagttcttcatggcggtgaaggagaaggtctccgtccaccagaccgaggatgcgaggattctgttcgaattggaatgcccaaagcctgttctctgtgctacacctgctaagaatggacttct

SEQ ID NO: 91395 - DNA, 254 bp, Glycine max
  Clone ID: 700903268H1
gaagaaggcagacaagaagaccgtggagacgtacaagatctacatattcaaggtgctgaagcaagtgcaccctgacatcgggatctccagcaaaaccatggggatcatgaacagcttcatcaacgacatcttcgagaagctcgctcaggaatcttccaggctcgcgcgctacaacaagaagcctaccatcacctctcgcgagatccagaccgccgttcgtcttgttctccccggcgagctcgccaagcacgctg

SEQ ID NO: 91396 - DNA, 264 bp, Glycine max
  Clone ID: 700903269H1
aattcggctctatggatgtttagtccgggaggcacccagatgtgagtgtttgacaatacctagcacatagtagcaagtctgtgccttccccgtgacctttgaactcagttttccgttctgacagtgttgaggtatagatcatgctgtattgattcacaggccaatgcgtgtaacatacaacgtgtactagttttgctttccataaattaggagcatgcaaggaaatcaagtcaactgcatgaattaaaatatcttgagtttcat

SEQ ID NO: 91397 - DNA, 250 bp, Glycine max
  Clone ID: 700903277H1
atagtgttaaaagacctatatttggtaaaccaatcaaattggacattaataaaggaattgagagggcataacatattggaggaggcaaatctgtagccacagtcctagccattggcacagcaaatccacccaatttcatcctacaggaggattatcctgacttctactttcgggtcaccaatagcgaccatttgcaccgcttgaagcaaaagttcaagcgcatttgcgagaattcaaagatagaaaagcg

SEQ ID NO: 91398 - DNA, 238 bp, Glycine max
  Clone ID: 700903280H1
caacgggtagatgatatcttgcagtttattgcagatttgactgtagatggtgaaggtgttggtcatgtttgcagttttagtgtcttcaattttcaagagcatggaaacagtaattatggctctccatttaatgcacctcacagccatagatcctcccaggggaagttggagaatccatttgtgagctttcagagtagttaccctgcatgggaaccaaatgctcaagggaggcagtttc

SEQ ID NO: 91399 - DNA, 249 bp, Glycine max
  Clone ID: 700903282H1
gttttagcgcagttcttctagatttaaggaagatgggtaaggaaaaggttcacatcagtattgtggttattggccatgttgactctgggaagtccactaccactggccacatgatctacaagcttggaggcattgacaagcgtgttattgagagatttgagaaggaagctgctgagatgaacaagaggtctttcaagtatgcctgggtgcttgataagcttaaggctgagcgtgaaagaggaatcacaa

SEQ ID NO: 91400 - DNA, 371 bp, Glycine max
  unsure (1)..(371): unsure at all n locations
  Clone ID: 700862902H1
ctcggaatcggctcgaggtgagaacgataatggagcattgtaactgctacatgttcacgctgagccttcttcttcttcttcttcttactccgccttctctctccgacgatctcggattcgattttccggcgaagaagctgataagagaccttaacctttttccttctgaagatgtcaacatcgttcctcgccactccaattctcacgccaacaaaatcgtcgagaaaccgcttaggttcccanacttagtgccttcagactccggcatttccctcgacgacttggctcaccgcgctggctattatcttattcctcattctcatgctgccaaagatgtctacttnttctttgaatcaaaggacagcaagaag

SEQ ID NO: 91401 - DNA, 344 bp, Glycine max
  unsure (1)..(344): unsure at all n locations
  Clone ID: 700862903H1
attgcccctggaggagaaaactgcgttgtcatttacaccaccacgttacgggggatcagaanaacgtttgaggagtgcaacaaggtaaggtccattgtcgagtcctattgcgtgcacgtggtggagcgtgacgtgtcaatggattcggggtttaaggaggagttgcggaagctgatggggaccanacaagttaaggttccggttgtgttcgtgaaaggaaggttggtcgggggtgctgaggaaattgtgaagttggaagaagagggataattgggtgttctctttgaagggtttcccacaaggctttgggggagtgtgaagggtgtggtggtgtgaagtttgta

SEQ ID NO: 91402 - DNA, 347 bp, Glycine max
  unsure (1)..(347): unsure at all n locations
  Clone ID: 700862904H1
ctccaaagtgtcatgaaaatagagaatgcttgctttggtgttcatgtgagagggtcagagtatattccacttcttggatccaacgatccaagttctttcttagtgggagttccagatattgaactatgagttatgcattggacgctttgtgagatccatgtanatgagagaatagtctgctagaaggttttggaggttgatatcactgcatggaccaatcttgactatattttgcgtttgcacatgatcatcgaagagganaattaagacgattcttaacaaagatgagaatgtacgcttctcattttatttgaaaaggttgataattttcacatgatgttattgaa

SEQ ID NO: 91403 - DNA, 138 bp, Glycine max
  Clone ID: 700862906H1
atcgagagtgtcttgtgttgctagtgcaagaggctgcaatatagatagatacgttcgtgcgtacgtaagaagggtacgtacgcggtagtacacaagacacgacgccgttttgcactctgttcttatttccgatcatga

SEQ ID NO: 91404 - DNA, 336 bp, Glycine max
  unsure (1)..(336): unsure at all n locations
  Clone ID: 700862910H1
caacggtatattgaacgtgtctgcggaggacaanaccactggacagaagaacaagattacaattaccaacgacaagggcaggctttctaaggaggagattgagaagatggtgcaggaagctgagaaatacaagtctgaggacgaggagcataagaagaaagtggaggccanaaatgcattggaaaattatgcctataacatgaggaacacaatcaaggatgacaagattgcttccanactgtcttctgatgataagaagaaaattgaagatgcgattgagcaggctatccaatggctangatggaaccacttgctgaggctgacgaaattgaggat

SEQ ID NO: 91405 - DNA, 324 bp, Glycine max
  Clone ID: 700862911H1
ccgattgatacacccttcttcgttcctcactcaccagccacagattctctcttctctattcagtaaacggctgttttgtatacgagctgtcccggtctcagcctctacatcccaaaacatcaaaacaactggttgggctccttgtatggcttcttcctcagttggtagaagagctacatattcaacacaatctgtatcgacaaatgagccagttgtatctgtagattggctttatgataacctgaaggagccagatatcaaggtactagatgcttcgtggtacatgccggatgagcagaggaatccaattcaagaatatcaggt

SEQ ID NO: 91406 - DNA, 325 bp, Glycine max
  unsure (1)..(325): unsure at all n locations
  Clone ID: 700862912H1
cgctagctanagctgatatgattatcacatagaacttgccaaaaaaaaaaagtactgcaaaaaaagggaaaaatagttggataaaaaacaatgattattaatttctcaaagttgaggaagaggagcttaaggggcaggactttaattatattagtattaatttacagtagctgtggcggtggttaatcatcaaaagctctctttttgatgcgagcgtgagtcaaaggcaggtttgttatggaacgaggagggggtttgaagaaccccaaattgaataaagtggttttgattggagggaaaagcttgaatggaaggatagggttcc

SEQ ID NO: 91407 - DNA, 360 bp, Glycine max
  unsure (1)..(360): unsure at all n locations
  Clone ID: 700862914H1
cgtagtaactcggaatcggctcgagattctcactcgtcgtcttcgtctgcgccctaaccaaattcaattcaaactcttctcatcaaaatccaaggctcgttcttgaaaccctaattcgatatcctcctcctcagaagaagaaggatcgatgtgggcagcttcttgcctggcgtcatgctgcgcggcctgcgcatgcgacgcctgcaggaccgtcgtatcgggaatcagccgccgttccgccaggatcgcctactgcggcctcttcgccttctctctcgtcgtcgcctggatcctccgtgaggtcgccgctcncctcatggaatcccttccctggatcaatcacttcaaacacacacctag

SEQ ID NO: 91408 - DNA, 334 bp, Glycine max
  unsure (1)..(334): unsure at all n locations
  Clone ID: 700862915H1
ctgaagaagagaggtatggcanaaagggtcttcttgtacaaggatttggttccttttggggccatggtgaccatggaatgcctcaacgtagccttgaatactctgttcaaagcagctaccttgagagggatgagttaccatgtctttgttgtttatgcttatgctgttgctgctattgttctcattcctggaccctttatctcccaaaggtgcagatcaagagtgcttcctccgctcagtttccccctactacgcaaaattggtcttctcgggctaatagggtgtgcttctcagatcgtgggatacacaggcatcagtttcagttcncccactc

SEQ ID NO: 91409 - DNA, 331 bp, Glycine max
  unsure (1)..(331): unsure at all n locations
  Clone ID: 700862916H1
cgcattcgtgagaanactcaatattcgtcgctcatggcactctcttctcgtctcttttccaaatccaaattgatctatggcagtcaaatacttctacaaaaggagcatgctattccagttcgtcactttgctanagagtctgcccctcctgcccttaagggagacgagatgctgaagaacatttttgtggaggtgaagaacaaatttgagaccgccataggaatattaaagaaggagaaaatcaccattgacccagaagatccagctgctgtttctcattatgcaaaggtcatgataacaattagagagaaggcaagcttattgtcggagt

SEQ ID NO: 91410 - DNA, 349 bp, Glycine max
  Clone ID: 700862917H1
cggctcgagcaaaattggtggtattggtaccgtgccagtgggacgtgttgagactggtgtcatgaagcccggtatggtggtgacttttggtcccactgggctgacaactgaggttaagtctgttgagatgcaccatgaggctctcacagaggctcttccaggtgacaatgttggctttaatgtgaagaatgttgcagtcaaggatctcaagcgtggttttgttgcatccaactccaaggatgaccctgccaaggaagctgccaacttcacatctcaagtcattatcatgaaccaccctggccagattggaaatggatacgcaccggtgcttgattgccacacttctcac

SEQ ID NO: 91411 - DNA, 350 bp, Glycine max
  unsure (1)..(350): unsure at all n locations
  Clone ID: 700862918H1
cgagccatatggaatttgacgagcacgaggaccaagagcaagaagaggaggaggaggaggaggaaatgggattctcagtggcggcggcggcgagttacgactcgctgggaaacgccgcggtgaggtctanaattagcggcggcgatggtgttgcggccaccgtgaattccggtcgcaaagggacggtgagatacagagaatgtcagaagaaccatgccgtcagcatcggcggccacgccgtcgacggatgctgcgagttcttggctgccggagaggaaggcacgctggaagccgtaatttgcgccgcctgtaactgccaccgcaacttccaccgcaaggagatcgacggc

SEQ ID NO: 91412 - DNA, 341 bp, Glycine max
  unsure (1)..(341): unsure at all n locations
  Clone ID: 700862919H1
cttcattctagaatataactgagggaagtatttggcncatgcttgctcaagaaagtttaaaggcattaggtggattgggtctgctttctcttggggcaaagtacattctcagaagagtttttgaggttgttgcagatacaaggagctcagaggcttttgttgctctttgcttgctgactgttgcagggacttcactagtcacacagaatttgggatttagtgacacgcttggggcttttttagctggagcaattttagcagagacaaacttcaggacccagattgaagcagacataagaccatttagaggcttgcttcttgggttgttatttctactacgg

SEQ ID NO: 91413 - DNA, 345 bp, Glycine max
  unsure (1)..(345): unsure at all n locations
  Clone ID: 700862920H1
ctcgagccgttcttcccaaccactactactcactcactgcagatctcaattgcatcgctgtccatggctaccatcgttagcatcaaggcccgccagatcttcgacagtcgtggcaatccaactgtcgaggtggatttgacttgctccgatggtacttttgccagagctgctgttccaagtggtgcatccactgggatttatgaggcccttgaattgagagatggaggatctgactaccttggaaagggtgtatcaaaggctgttgacaatgtgatcancgtcattggccctgctttgattggcaaggacccaactgagcagactgctattgacaacttaatggtt

SEQ ID NO: 91414 - DNA, 298 bp, Glycine max
  Clone ID: 700862921H1
gcactggacttggagaaagaaccacttccagagaagcataatgtcgacctaaggccaacgactgtaaaagaaaataaggacggaagctgcttaaacgtatttaccattatccaagaggcaccctgttcatctgtatcttccgccaacaagaattcaacatcaatatcagtgccactgagaaattcatgtgccctaagggagtttataccttcggtaaaagaggtaataactcgagatgataccaacgaatctttcgttactgatgagcttgaaaatcagaagtaggagatagatgatg

SEQ ID NO: 91415 - DNA, 336 bp, Glycine max
  Clone ID: 700862923H1
ttgccctctccttttctctctctagaattctcagatttgcggggcgagatgatgcagcagccaggacccggcatggcacctcccaccatgggccagcagccgcagcaacagtaccagcagcagcctccgccgcagcagcaacaaccctacgtcatgatgccgccgcagcatcaggcgccgcagcctatgtgggccccatccgcccagcctccgctgccgcagcagcctgctagcgccgacgaggtccgaaccctctggatcggggatctgcagtactggatggacgagaactatctctacacctgctttgctcataccggcgaggtttcgtcagtt

SEQ ID NO: 91416 - DNA, 336 bp, Glycine max
  Clone ID: 700862925H1
caaactctttcttccaaaactttgttattcctaatgggacacagcctgagtacattcatccttacctcatccaatcctcaaactcttcactctcagcctcattccctcttctcctcttcaccacagcactcctgtaccaagcttttgtgccagatctcactatctctgcctctaaaacatactcatcatatcaacaaaaccgtgtagtctcatcctacagtgaccttggtgtcactttggacattccaagctccaaccttcgattctttcttgtcagaggaagcccttatataactgcttctgtcacaaagccaacacctctttccatcaaaacag

SEQ ID NO: 91417 - DNA, 306 bp, Glycine max
  Clone ID: 700862926H1
ttcccttgcacgtgaggcacttattagtgcaaatggggtcattgaaatttcattccttactaataaatattcaatggaattaagctctgtggcatacgatcaactttggcaatttgattcgcaagcacttcccaatgatcttatttccaggggaatggctgtggcagatcctaatgcaccacatggcctaaagctaacaattgaagattatccttttgccaatgatggtcttctcatatgggatgccatcaaacaatgggtcaccgactatgtcaaccattactatccaaccccaagcatcataga

SEQ ID NO: 91418 - DNA, 329 bp, Glycine max
  Clone ID: 700862927H1
gaaagtgagaggagagagaaagtagctgatcctccatggcctccaccaaggaacgcgaaaactttgtctacaccgccaagctcgccgaacaagccgaacgctatgaagaaatggtggaagcaatgaagaatgtggcgaactgaacgtggaattgacggtcgaggagcggaaccttctgtcggtagggtacaagaacgtggtgggtgctcgtagggcttcgtggaggattctatcgtcgattgaacagaaagaagaagctaaagggaacgatgtgagtgtgaagaggataaaggagtataggcagaaggtggagtctgagttgaccaata

SEQ ID NO: 91419 - DNA, 329 bp, Glycine max
  Clone ID: 700862928H1
ctttgttcttctaccttattttctttccctagtcaaggagattcatctctgcagcaggttgttttagaaaagaaaaaatgctgaagatttgctgcattggggctggatatgtggggggtccaacaatggcagtcattgcactgaaatgcccctcaattgaagtggctgttgttgacatctctaaatccaggattgcagcatggaacagtgaccagctccctatctatgagccaggccttgatgatgtggtgaagcaatgtcgtggcaagaaccttttcttcagcactgatgttgagaaacatgtctatgaggccgacatagtgttcgtc

SEQ ID NO: 91420 - DNA, 333 bp, Glycine max
  Clone ID: 700862929H1
tactcgagccgaatcggctcgagggtgagctcattgacaatggctgacccaaagtgggtcatacacggacaaaagatggtctctccatggaatgacagctctagtcacaggaggcacccgaggcatagggcatgccattgttgaagagttagctgagtttggagcaactgttcatatatgtgcacgtaatcaagatgatattgataaatgtttagaagagtggaaaaacaagggacttaatgtgactggttcagtatgtgatttactatgttctgaccaacgtaaaagattaatggaaattgttggctccatctttcatggaaagctcaatat

SEQ ID NO: 91421 - DNA, 334 bp, Glycine max
  unsure (1)..(334): unsure at all n locations
  Clone ID: 700862930H1
gtgatatgtatagcaatgatccaacctctgccaaacaagccatgtgcttctttcttgatcctgaaacgtccaaatatattgcatttgttcaattccctcaaatgtttcacaaccttagcaaaaaagacatctatgataatcaatctagaactgcttttaagactatgtggcaaggcatggatggactaagaggtccaggtctttcaggcagcggcaattacttaagtagaagtgctttactatttggaagtccaaaccanaaagacgactatctgaaggatgcacaaaagtactttggcaagtctaccgcatacattgaatcactgaaggccat

SEQ ID NO: 91422 - DNA, 309 bp, Glycine max
  unsure (1)..(309): unsure at all n locations
  Clone ID: 700862931H1
ttctacgcaacctttttcctntctccaatggcgcctctcttccaatgccaccatacccatcaccccctttttcgtctccgcttcacctaacatagtgatccaagattcaggttttgcttgatgctgatgggggtctttttcacttgtggtgatcactgaggtggtgatgctgtgagaagtatatgatttggtctttatctcgtgtgtttgtggagtttgctatttgaagagagaggtttatgaatttgacaagtggtagattttgttctttttgtggtaaagatatgttcttgggtggacgggggaatt

SEQ ID NO: 91423 - DNA, 334 bp, Glycine max
  unsure (1)..(334): unsure at all n locations
  Clone ID: 700862932H1
ttatgatggtagaagatcccttgaagagagcaacagtgaggcaaatcccatttcaagtggtaaaaaggaggattctgccatgggtgaaattatatattttcgtgattcagatgatgagatgccagattctgatgaggacccggatgatgatttagatatatgaatatactcttgttggtaacttttgtatccctaggtgacatgaaaggatagattaggtttatgactgaacaaaatgggaaaaaaataatctgatactgtttaattgcttagaagtgaaatgcagtgtgcatcacattccanaatattgtacaacctactgaggaacctgact

SEQ ID NO: 91424 - DNA, 271 bp, Glycine max
  Clone ID: 700862933H1
gaaagaatggatctcatgcgagcagctattgttggtgcatctggaaccccttatcatgaagggttgtttttctttgacatatgcttccctccggagtatcccaacgaaccacctatggtgcactacaattctggagggctccgattaaatcctaatctgtacgagtcaggaaaaatttgtctgagtctcctgaacacttggacaggcacaggtactgaagtgtggaccctggagcctccactattcttcatgtccttctctctctacaggc

SEQ ID NO: 91425 - DNA, 272 bp, Glycine max
  Clone ID: 700862935H1
ttctgagagtaacaatcaaagtttggaaaaaaaaaaagttttgagggaagaaaagaccaatatgctgggtgtggccactcttactttgggttcatccaccacaatggtggctcagaaccatgctcaacaacatgccaccactcttgcctcagccaatggaaacagaaggcacagtgtttccaacaggactcactccttgcctatgagtttggtgtctcccaccaaccaaagtttcacctttctctcttcctttaaagaacaacacttgaagg

SEQ ID NO: 91426 - DNA, 344 bp, Glycine max
  Clone ID: 700862936H1
tatgaacaaattgttcatagtttcttattaacaagttctttatcagaacttcaataagaatgatctcaaaattcttattaagaacatggagtatgggtatattagtttttatcaccttgagacaccactttctccttcatttccatctcttttccactcacgaatttgctgctctcaccattccaccttatttctgctcctctgccctgtttaaaaatcacagttacataccgaatttgtcagcaatacttttaccgttgggtcagttttttgttgattttgcgaaaattaattgtgactttttggattcaattgtaatatttttgctgtattttgcattctat

SEQ ID NO: 91427 - DNA, 176 bp, Glycine max
  Clone ID: 700862937H1
gtgtgattcctggacaaagagctcttgcattgcatctcctgtcgtctgtgcttgataaggcattacactatatttgcaaagacagaacagggtatatgacaaaaaatgagaacaaagttgacaaatcagttgactgggaagctgtctgggcttttgcactgggcccagaacctgag

SEQ ID NO: 91428 - DNA, 124 bp, Glycine max
  Clone ID: 700862938H1
gattaccacaggtaccttgctgagttcaagaccggggcagagaggaaagaggctgcagagagtactttgcatgcttacaaatccgctcaggatatagctcttgctgacttggaccgcactcacc

SEQ ID NO: 91429 - DNA, 334 bp, Glycine max
  Clone ID: 700862941H1
cacaaagcacaaagcaaagctcatccttgagttaaaaaatggcagcagcttcttccatggctctctcatccccatccttggctggcaaggccgtgaagctgggcccatcagccccagaagtgggaagggtgagcatgaggaagaccgtcaccaagcaggtctcctcaggaagcccatggtacggcccagaccgagtcaagtacttgggcccattctctggcgagcccccgtcctacctaaccggtgagttcccaggcgactacggctgggacactgctgggctttccgcagacccagaaaccttcgccaagaaccgtgaactcgaagtgatcca

SEQ ID NO: 91430 - DNA, 186 bp, Glycine max
  unsure (1)..(186): unsure at all n locations
  Clone ID: 700862942H1
acaattactactttctctctctttgtaacttgtaagcatggagtcctcaaagatctatgcttacctcttcctttgcatgctcttcctctcctccgccactcccattctcggttgtggctactgtggcaaaccccccaaaaagcacaagcctggcanaacaccaaagacacccacagtacccgttgt

SEQ ID NO: 91431 - DNA, 328 bp, Glycine max
  Clone ID: 700862943H1
aacgcaacaacgcaaactaacaacaaccaccaccaccaccacaacaacaacgtttgtgtctggtcgtgttgtgttgttagggattcatggcaacaataaacccttgattcctctccccattctcccaagagaagggccattttgttacagtgtcggacacttgcaaatggatttagaagacaagttcctcgctaaagggagggttctgggttctagtgcaggtcctctagctactgctgattgatgcatacatgataaatagtttctggtgttcaaagcctttcatccagtgcacaaagtactccagataaaaatggccattcagatg

SEQ ID NO: 91432 - DNA, 328 bp, Glycine max
  unsure (1)..(328): unsure at all n locations
  Clone ID: 700862944H1
gcaatgctgaatgaatcaaggattcacataattgacttccaagttgcacagggcactcagtggctgttgcttattcaagctcttgcatctcgtccaagtggagcacctttcattcgtgtaaccggagttgatgattcacaatcatttcatgcaaggggtggaggacttcacattgtaggaaaacgcctctcagattatgccaaatcttgtggagttccatttgaggtccacagtgctgctatgtgtggaagtgagcttgaacntagaaaccttgtaattcaacccggggaagctctagttgtgaacttccctttntgtttgcaccaca

SEQ ID NO: 91433 - DNA, 325 bp, Glycine max
  Clone ID: 700862945H1
attggttcctagcagatttgagccttgtggtctcattcagttacaagctatgcgctatggatctgtaccaattgttgcctcaacaggtggattagttgacactgtcaaagaaggtttcactggatttcagatgggtgccttcagtgttgaatgtgatgctgtggatccagctgatgtggatgctatagcaaagactgtcaaaagggcccttgcagtctatggaactccagcttttacagaaataataaagaactgcatggctcaagatctttcctggaaggggcctgctaagaagtgggaggaagtgctgctaagcctgggagtt

SEQ ID NO: 91434 - DNA, 329 bp, Glycine max
  unsure (1)..(329): unsure at all n locations
  Clone ID: 700862946H1
atttgtctcttctttgagagtttatgagaaagcgtccattgaaggaacagaagattcacatgagggaagatatgattctgatggttcagagaaaagccttgattcatttgttatccagctgtttgaactcatgttgaccattgtgggtaatccaagactgggaaaggtggttgtggctaatatcagagaattggtgtactatactattgcttttcttcaaatgactgagcagcaggttcatacatggtctgtggatgctaaccagttcattgctgatgaagaagatgccacttatagttgccgcgtctctggtgtgcttntactggaag

SEQ ID NO: 91435 - DNA, 332 bp, Glycine max
  Clone ID: 700862948H1
gcacccctaaagcactgacaactcttcttcttcacacttctctttcagatctacacaacacacaccaaaaaataaataaaatgcaactccaactcacactctccagtctcttcctctcccttttgttaacaataacattaacatctccaaccttggcagcacaaagcaagccgcaggatctggtccggtcctcgtgcgtgcacgcgcggtacccgcgtctgtgcctgcacaccctctccaactatccgggctccgccaacacgccattagacgtggcccggacagcgctgaaggtgagcctagcgcacacacgccgggcctccaagttcctg

SEQ ID NO: 91436 - DNA, 341 bp, Glycine max
  unsure (1)..(341): unsure at all n locations
  Clone ID: 700862950H1
gtggtaatggcagcgtcactacaagcagcagctactttcatgcaacccaccaagttgagcaggagcaacactttgcagcaaaagtctactcagtccatttccaaggcttttggtttggaacctgttggagctaaaaaggtcacatgctcccttcaggctgatcttaaggacttggctcacaagtgtgttgatgctaccanaattgcaggattcgcccttgccacctctgccctcgttgtctctggggcaagtgctgaaggtgttccaaagaggctaaccttcgacgaaatccagagcaagacctacttggaagtgaaggggacaggaacagcaaaccagtg

SEQ ID NO: 91437 - DNA, 286 bp, Glycine max
  Clone ID: 700862952H1
gatcacataacatggcatcattggcatgcaacacgtttattgttagcagcacgttaagatcagttgttactcgtgcggaaccacctaaacctggtcctcttttcgatcttagttcattcaatcgccacagctttccggcaggcttcactttcggggcatcatcttccgcgtaccagtttgaaggtgcggcaaaagaatatggtagaggaccaagtatatgggatactttcatcaatcaacatccaggtaagatagcagatggaacgaatggagatcgcgcacttga

SEQ ID NO: 91438 - DNA, 315 bp, Glycine max
  Clone ID: 700862953H1
gcagacttgcagatgccattgcagacatttcagacttggcgaagttggaaggatggtcccttcatattcaatactcgacctatgagctctgacccgtgccagcagccagctaggtttttcctggatcaggctacaaaggtgggaaaaagtggaagtatcactatctacaagagacatgaaggcaaggaagcaaagtgcaacagagaaggcactaataatgaggaagtgcaaagaattagagtttctgccttgaagctggatccagaatattggaagaatgtaccccgtaggcattgctgtcaacttttgggtggt

SEQ ID NO: 91439 - DNA, 242 bp, Glycine max
  Clone ID: 700862954H1
tctcgagccgattcggctcgagtatctttcaggaactcgtctgccatctcatgcagcaattatatgtggactggtaaagaataaggtaatacaccctaatccctgttaacttcttggcttacttagtccttatggtagacttgtgttttggcttgatattgacaatttcttattgatagcactgacatgaatgttttacaggtttatccggatttagaagtagcttttgtcatttcagaaga

SEQ ID NO: 91440 - DNA, 334 bp, Glycine max
  Clone ID: 700862956H1
agagaaggtgatcctgtaccaaggatggtgttcgttgtccgagggcgcataaaacgcaaccaaagccttagcaaaggcatggtagcctcaagcatccttgatcccggaggtttttgggtgacgagctactttcatggtgccttcgtcggccgtttatcgacagacttccggcctcctccgccacatttgtatgtcttgaatcagcagaagcctttggccttgatgccaataacttgaggtacatcactgatcacttccggtacaaatttgcatatgagaggctgaaaagaacagcaagatattactcatccaattggagaacttgggctgctgt

SEQ ID NO: 91441 - DNA, 293 bp, Glycine max
  Clone ID: 700862958H1
cgaccacctccggcgccgttgatcgacccagatgagctcactaagtggtccttgtacagagccgccatagctgagttcatagcaacactccttttcctttacatcaccgtgttgaccattattggctacaagagacagagtgacaccaaaatccccggtaacaccgagtgcgacggcgttggcattttgggcatcgcttggtgcttcggtggcatgatcttcatccttgtatactgcaccgcctgcatctctggtatagtggttctcacaaatcccacatcagctaatcatat

SEQ ID NO: 91442 - DNA, 321 bp, Glycine max
  Clone ID: 700862959H1
ctgtgacatggggtgtcttcccagctaaggagataattcaaccaaccattgtagatcctgtcagcttcaatgtatggaaggatgaggcatttgaaatttggtcaagaggatgggcaagcttgtaccctgaggatgaggcatccaggaaattggttgaagaggttgggggcagccacttcttggttagtttggtcgacaatgattacatcaatggtgatctttttgccgtctttgcagatttctgacatgagcttattatttattagtactttagctatgtcacttctgttggttgtcatgttctattcctttcttttgttt

SEQ ID NO: 91443 - DNA, 324 bp, Glycine max
  unsure (1)..(324): unsure at all n locations
  Clone ID: 700862960H1
ctgaaattcctcatcatgtcnccaaagttcttgagcttcactttataaggtgggagctacagggcctgaatagcttctacaaggatccttaccanatcagcatagatgttagaggttctttatacccagaaaggaagggaaaacatagttggctcaagaatcaaatggtgatgacgataaccttttgtgcttctccagcaatagctttcattcctgaaaatgtcttacaagatgccatagagctgattntcaaaacagtgtgggatgatatgaagcatgaattccatggtagactattggaagattataacaggttcaagagaa

SEQ ID NO: 91444 - DNA, 328 bp, Glycine max
  Clone ID: 700862962H1
atttcgcagtgtggaggatcgtcttcttcatccctcccacaccgagttcagttcagttagggtatctattttttaatggctaatagatccgatccggatattgatgatgattttcttgagctttataaggagtacactggccccctggggtctgctactacaaacacgcaagagagggcaaaatcaaataagaggtctaatgcagggtctgatgaggaggaggaagcccgggaccctaatgctgttccaaccgatttcaccagccgagaagctaaggtttgggaggctaagtcaaaggctacggataggaattggaagataaggaaag

SEQ ID NO: 91445 - DNA, 326 bp, Glycine max
  Clone ID: 700862963H1
ctcttatttgcagctttatatggagactatacaagatctgcttgaccctgccaatgataacataaccatcgtagaagatcccaaaactggtgatgtttcattacctggagctagcctagttgacattagggacaagcagagttttgtagaactattaagattaggagaggctcaccgctttgctgcaaatacaaaactgaatacagaatcttctcgaagtcatgctattctgatggtgcatgtaaagagatccgtgaaaggaagagatgcggctctttcaagtgaaaatggcaatcattcacacgtggttaaatcaataaagccgc

SEQ ID NO: 91446 - DNA, 327 bp, Glycine max
  unsure (1)..(327): unsure at all n locations
  Clone ID: 700862969H1
ggagtccaatgccacggcaaggctgctgactcggttggaggttgcgagctcnccacagaagaagataagtctgtcgtggttgttaagaggctacatcanaggcggccattttaacgaggcggcagagacgatcatgaaaatgcttgatttgggattctatccagagtacttggacagggcggctgtattacaaggtttgagganaagaatccagcaatatgggaatctagatacttatgtcaggctctgtaagtccctctctgatgcaaaccttataggacctgtcttgtacatntagtatatagacaatataagcttatgggtgtg

SEQ ID NO: 91447 - DNA, 214 bp, Glycine max
  Clone ID: 700862972H1
tgaccaagaacaacatgaattttctaaccttcgttactgttctactcttcatactaccagcaacctcatcttcccagtatttggggaacaaccttctcactcatcgcaagatattcctaaaaaaagacaacattattacctcgtacgctgtcatctttgacggtggtagcacaggaacccgtgtgcatgtcttccattttgaccagaatttgga

SEQ ID NO: 91448 - DNA, 167 bp, Glycine max
  Clone ID: 700862973H1
cgagttgagtggttaattagttgtgaactactaagattcgtttagttggttgagagtgctgttgttagttgtgaattacttcatagattcgtttggttggctgcgagtgtctgttctgtataggcaagtgtaggagtgtccgtgttagttgtgaactagtactaaga

SEQ ID NO: 91449 - DNA, 325 bp, Glycine max
  unsure (1)..(325): unsure at all n locations
  Clone ID: 700862974H1
cattctcctctctgaattcctcttattcaggaatttggagagtattgatatatcaaggtaggataaaccagtagccaaggaagatatggagttttctatgattttcattgttagcaacattatgctgcttttcagttcagcatttgccaaaactgctagtcctccctctctgagcccaactccagcaccagccccggcaccagacttcgtgaacctcactgagttactcagtgttgctggtccgtttcacaccttccttggataccttgagtccactagagtgattgacactttccanaaccaagccaacaacactgaagaaggt

SEQ ID NO: 91450 - DNA, 325 bp, Glycine max
  unsure (1)..(325): unsure at all n locations
  Clone ID: 700862978H1
atcaattctcaataatctgaaattcttcagaggctgtctggtangtacggtgtggtggtgtntcttcatcaatctattatcatcagccacctaagacaaattcacatttcattagacttcctactttctagggtttgtcacgtattcatatttatgctattaaattaaatggccggcaccggcgaccttgatgccgatgcggtactcagcgacgtcgaggacgacggcggcgatccgattccgctcgagacgaaggctccctcgccggaagacgtctccgtcgagaaactccgggatgttctcgccgaactcgatagggagcggt

SEQ ID NO: 91451 - DNA, 323 bp, Glycine max
  unsure (1)..(323): unsure at all n locations
  Clone ID: 700862979H1
ctgttaatccaggggatctgtggtcgggttcagaaggaggaggtataaaaatatggcctttggaggctgttgaaaaatctattcatcttacaaaggaggaaaggcacagtgctgccatatttgtggagaggtcctatgttgacttgaggagccagctatctacaaatggcttcagtaacatgctaacttcagatgtanagtacttagtatctgataattcgagagcanaggtgtggagtgctggctatttttcatttgctttgtgggatgctcgtacaagagagctactgaaagttttcaattcagatggacagattgagaat

SEQ ID NO: 91452 - DNA, 134 bp, Glycine max
  unsure (1)..(134): unsure at all n locations
  Clone ID: 700862981H1
accgtgaccatggcggctgcgtttacaagtacaagtgcaacactgagactgtcanatgttggagagagcagaggtttgcagctgcgtaagtgtaaccctaatcctaataagctgaaggttattggggggttttg

SEQ ID NO: 91453 - DNA, 333 bp, Glycine max
  Clone ID: 700862984H1
gatctctgacctcaggaatcttgaagttgaaagacacaggttgccgagcttgacgaactcgtcaatggcggagagggcaaaagaggctgagaaattaaatgaacaagctgcagtggctaacccagaggaagtggtttcaatggttgagatgagcatccaaaacagcacagagaggaggaagttgggatttttctcttgtggaactggcaaccccattgatgattgctggcgttgcgaccccaactggcaacgcaatcggaagcgtcttgcagattgtggcattggttttggccgaaacgccatcggtggccgtgatggaaaatctatgtggtg

SEQ ID NO: 91454 - DNA, 171 bp, Glycine max
  Clone ID: 700862985H1
gcctattggtaatccaggtatagtaccagcagttgcaccagctgtcccaacacaaattatgcctatcccagtgactgaacctgttggaaaccccagtgagtgtttactgttgaagaacatgtttgatccaaacactgagaccgaaccagattttgatctagacattaaaga

SEQ ID NO: 91455 - DNA, 329 bp, Glycine max
  Clone ID: 700862988H1
atgggtgcatgaatatagtgttgggaaatcttagaataatgattagtgattctgtgggattattaggggaaaaaaggtgaagagacgatgggtgcatgaatatagtgttgggaaatcttagaataatgattagtgattctgtgggattattaggggaaaaaaggtgaagaatcgaatcggtacgaacgcgattcttagctggagcgcgatgggaagattattgtgaagatttgtctcgatcgaccagaaaagcccgtttacttttaaagggggcttctgttccatattcacctcgtgtagaattagaacctgtactgtaaactcttttc

SEQ ID NO: 91456 - DNA, 319 bp, Glycine max
  Clone ID: 700862991H1
cgggcatcaggaactctatccactttatttgatgttggaggggtgctcggtggaattctagctggccacatttctgatcacttagaggctagagccattactgcagcaagtttcatgtactgtgcaatccccgctctcttcttctatcgaagttatgggcacgtttctttgattgtaaatggagcattgatgtttgtcactggcatgtttgtgaacggaccttatgctcttataactactgcagtttcagctgacctgggaacacataaatcattgaagggtaattcacgagctcttgcaactgtcacagcaatcattg

SEQ ID NO: 91457 - DNA, 275 bp, Glycine max
  Clone ID: 700862992H1
atttcattgatttctccctcttcgctctctctcagtgaccagagacagatgatgatggagatggcgaacgataacgctgtcgttgcggcactcgcggcgttggtgctactcgcggcgagtgtggcggtggatgctcaggagaactcggacgtgaagacgctggtgaagtacaagcacgggaagaagtactgcgacaaaggatgggaatgtaagggctggtcaatttactgttgtaacctcaccattaccgattatttccagacctaccagttcga

SEQ ID NO: 91458 - DNA, 325 bp, Glycine max
  unsure (1)..(325): unsure at all n locations
  Clone ID: 700862993H1
agtctgaggtcaagcagatgataanaaaaatatctaggcatgcctcatcttcaaaagttacaaatttaaatgaagtgcttatatctcttattagtactattgtatgtagaattgttttggggagaaggtatgaagaggagggatctgaaggtagcagattccataagttgttcaatgagtgtgaagctatgttgggtaacttctttgtttcagattatattcctttcatgggttggattgataaactcaggggactggatgcacgtcttgaacgcaatttcaaggagatggataagttctaccaagaagccattgatgaacacat

SEQ ID NO: 91459 - DNA, 324 bp, Glycine max
  Clone ID: 700862994H1
ggatttctgataacacagaccaactcatttgggcacatgtttagggcttataatgatgctgaaagtgagaggcatgaaggagtggagaacttctacagaaaaaatcacacttaccaatcaattgatttcgtgaagaaaatgagagaggagtacgcaaaattgaacagggtagagatgagcatatgggaatgttgtgaactccttaatgaagtggtggatgagagtgaccctgacttggatgaacctcagattgaacacttgctccagacagccgaagctataaggagggactaccctgatgaagattggttgcacctaactggc

SEQ ID NO: 91460 - DNA, 294 bp, Glycine max
  unsure (1)..(294): unsure at all n locations
  Clone ID: 700862995H1
acgcaacatatgtccttatctcttattctanactctgaataaacctgaagtatactactagggaagcatcagattttcatgctcctcctttcattanattaaagtgcagaacnagttctaggtatgganactctntcatatgggtcagcaccatgctgccaagtcgtgaactcatagtggacattagttgaatcagagttgagttcacgtcaatcaagagttcctctataggaaacttggagttattacacaggtactattctgcatgtgcgctgtgagatttatgagatggta

SEQ ID NO: 91461 - DNA, 317 bp, Glycine max
  Clone ID: 700862996H1
gtgatttcagtgagtgatcggtgttcacttgatctcatcataatcgtcagcgtcaattgaagaagatgccgatcagaaacatcgccgtcggaaggcctgaagaggcgactcaccccgacacgttgaaggcggctttggctgagttcatctcaaccttcatcttcgtgttcgccggctcaggctccggcatcgcctacaacaagctcaccgacaacggcgctgccacccctgccggcctcatctccgcctccatcgcccatgcattcgccctcttcgtcgccgtctccgtcggcgccaacatctccggcggccacgtc

SEQ ID NO: 91462 - DNA, 251 bp, Glycine max
  Clone ID: 700863001H1
aaatgaaaacccaaagtgcttctctcctctgtctttttctctctcttgctatccttttggctagtggcactgctgcaagtgcaactccaagaagcgcagtgccaagccaccatgtttcaacattcaacagaagcctttttccttccattttctctttggaattggttcttctgcttaccaggcagaaggagcagcaagtgtagatgggagaggaccaagcatatgggacacctacactagacagcatactg

SEQ ID NO: 91463 - DNA, 252 bp, Glycine max
  Clone ID: 700863004H1
ggctcgagctcatctctgacgccccagacgccgccatcgcctcccgcgaccccatcatcgcccccaacgtcatcaacgccaccttccgcaacttcatcgaagtcatcctcgagaaccccaccaaggtcacccagtcctacaaccttgatggctctctttcttttccgtcgcggttgaggcggggcagtggagcccagagaagaggaagtgctacaaccttcttgatgctgtcagcaggcacaccatccaggt

SEQ ID NO: 91464 - DNA, 226 bp, Glycine max
  Clone ID: 700863005H1
ctttgcagcaaagagaaaaaagagagaaatcaagaagagcatatggtggtgcctgagtctcagatgaattcccaaaacgaggtagaatcgccgctacaattggaggagcagcctcaacaacaaaacaacacaacaacaagaaccacccattctcatcactaggaagacaatcttcttcaatatactcgctcaccctcgacgagttccaacacactctatgggagaa

SEQ ID NO: 91465 - DNA, 240 bp, Glycine max
  Clone ID: 700863006H1
ccaagttgggtttcattgtttcatgagcactttcattatgttggagtctttagcttggtgccaaagctttaagggatatgaccttaccaaacagaagagtccgggttactcccatgccatttcacgagtttatagaaatttattttcatgctttactcagttaaaaagcaagtgccactactaccacatggtgctagtcatgggatatttcataggacgtgtgtgtcagaaaaattcttt

SEQ ID NO: 91466 - DNA, 198 bp, Glycine max
  Clone ID: 700863007H1
aaaataaataaagggcattaggggtgcaatggccattgcaaagagtgcttccattcttattattttgtgctttgcattggcctgcaatgcggataatcctggaaaaccagacccagttgctagtcctgacatgttcagcaataacaatgtggctaaggatgtgctccttcccggggaacaaatagttaacgtccagga

SEQ ID NO: 91467 - DNA, 196 bp, Glycine max
  Clone ID: 700863009H1
tccatggctaccattgttagcatcaaggcccgccagatctttgacagtcgtggcaatccaaccgtcgaggtggatttgacatgctccgatggtactttgctagagctgctgttccaagtggtgcatccactgggatttatgaggcccttgaattgagagatggaggatctgactaccttggaaagggtgtatcaaa

SEQ ID NO: 91468 - DNA, 242 bp, Glycine max
  Clone ID: 700863010H1
ggaggaggaggaggaggagagagaagaagagaaaaagaagcataagcaggctcctccttctctcttccctattagtgtgagaaaggggtttagtggtgaaagagtgaagagagatgagtggagtgaaggggcagtgtcaacccacttgaggcctatgaggccaaatgggtgctaagaaacagagccaagctcaagggccatgactgggaggacgtggcccggcacgtgtcatcacgtgccaa

SEQ ID NO: 91469 - DNA, 199 bp, Glycine max
  Clone ID: 700863011H1
agtcccattcccactaccgaagcaaattaagaagatgaagcagcagagagtggagtttatgggcatgggcatgggcatgggcatgggcctgggccttttgtggtgatgatggcatgtgggtcggcgagtggtgcggatgatttggcaaccaagtgttcagcggtgattcagaaggtaataccgtgtttggatttcgcga

SEQ ID NO: 91470 - DNA, 244 bp, Glycine max
  Clone ID: 700863013H1
cgagacccactgtattgtttccctctgtttctcttctccctttattccctgcctgccatttttatttttatttcttaaccatttatttatttaattagtgcttccccctcctccattctcattctccctgcatcacatacacagtcattctctctctccttttgacctaaatcatcttctgctgattccgcgcatttttctgtgacgaattgctcccaaattgtttcggttaacagtgctcgtg

SEQ ID NO: 91471 - DNA, 252 bp, Glycine max
  Clone ID: 700863014H1
ttcggctcgagcctcactctctctctctctaaccccaacaaacaaaccccttctctctctaccacctctactttctctctctagggtttcgtcgcgaactctcactctcgctttcgctctgcttgtcacgattgtagggttccaatcctcgcgcaattgcatcacagtctgtgatcgaccgagttttgattcttccccttcctcgggctaaaggattgttgtcatcactgacacaaaccaaatgttgctgta

SEQ ID NO: 91472 - DNA, 195 bp, Glycine max
  Clone ID: 700863015H1
gctcattttcgcgttctgcgccgtcgccgtcgccgtcgccgtcgcgggctcctccttcgatgatgccaaccctatccgtttagcgtcggacttggagtcgcaggtgctggacgtgatcggacagagccgccacgctctctccttcgcccgcttcgctcgccgccacggcaagcgctaccgttccgtcgacgagat

SEQ ID NO: 91473 - DNA, 245 bp, Glycine max
  Clone ID: 700863016H1
cttatcgctgtggttatcatcttcttcttcctctttcttagatctcttctttctctacgccgcacgccgaaaccatggccggaaaaggagagggtcctgctatcggaatcgatctcggaaccacctactcttgcgtcggtgtgtgcaacatgaccgcgttgaaatcatcgccaacgaccaagggaacagaaccacgccgtcttacgtcggattcactgacaccgagcgtctcatcggtgatgcgg

SEQ ID NO: 91474 - DNA, 209 bp, Glycine max
  Clone ID: 700863018H1
cttccaccaccatagtctatcatgcgtgatccaccccgaccagaaatcaaacatgaaacccttgacactctctgtttctgaccttccaatgttgtcatgtcactacaccaaaagggcgtgttactcaccgccccgccctcctcttttgacgacttaatactttcttttaaacacactctttctatcgcgctctctcactttcccgctct

SEQ ID NO: 91475 - DNA, 244 bp, Glycine max
  Clone ID: 700863019H1
caggttgtcaactaatatgaatgactaaggtggcttcaaattgaagaaccaaagttcaagttgcagggaaacagcaatgagcatttacaactgccgaatgttgttttttgacttaagaatcaaatagtctgtgcagattttggtggcaagaagcgttcactccctggtaatggtttctgcgaaagaagagccagattgcagcataccgcctgctgttgatggtttgttaagggttcataaacaa

SEQ ID NO: 91476 - DNA, 242 bp, Glycine max
  Clone ID: 700863022H1
gttttgtttatttgaaattaacaagtagcaaagatgtttggacatcatcggaggaaacaagggtcacaagataaaggggaacttggtgattatgcgaaagaatgtgttggatatcaacagcattaccagtgttaagggtgtcacggaaccggcattaacatcattggaggagtcgtcgacaccgttactgctttggcgtcccacatctccatccagctcattagtgccaccaaggctgatgg

SEQ ID NO: 91477 - DNA, 242 bp, Glycine max
  Clone ID: 700863023H1
gctgctgcaagtttcgctgctacattttggccgtatgcaaatccagaaacttcagcaaattctcctaggtgctcccaaggaggttttacaaatagacaaattggttcccctccatgcgttgcagctattgcagctgctactgagcagctgcaactgcatggtgggcagctcatggattgcttcctttgtgtgctcctcttcatacttcttttgcctgtcctgcatcagtgactacagttcca

SEQ ID NO: 91478 - DNA, 236 bp, Glycine max
  Clone ID: 700863025H1
tctcctctcactttcatttctacatccctggctctgttccgtcgatgacgatggcgtttagggtgcgaaaccctgacctccgctttctcattcttctctctctcttgtccatcacttccgccaaggtcttcttcgagagcgtttcgatgacggatggggaaatcgttgggttaaatcagattggaaaaaagatgagaacctggctggggagtggaaccacacctctggccaatgga

SEQ ID NO: 91479 - DNA, 246 bp, Glycine max
  Clone ID: 700863027H1
ctcttctccaatctcaccccagaaaaaacttgcaacaaaccaaaaaccatgcttgatgaatcagtctcatccaccccaacattcttgggcagcctgtacagctggttcacccccactgtcttcttcctcctcctccaactagtcattggcaccattttcatcatctcaaaccttgccaacacccacaaacaccaacaacaagaaccacaacaagcacatgactttccacaccaccatcttcccaga

SEQ ID NO: 91480 - DNA, 242 bp, Glycine max
  Clone ID: 700863029H1
cttcctctctttcacactcacctatggctcccatctcaaaactcattcctttcctattcttaacaacccttttagtgtctctccaagttaatgccagagacagccaattcttcagcaaagtcacccctctcaacaacaacataaagagactgaggttcccaaaaatgaaggccaagtaaacaagccagaacaacaaccagttttcaccccagaaacagaaaacagctatggtctatatggtc

SEQ ID NO: 91481 - DNA, 241 bp, Glycine max
  Clone ID: 700863030H1
gattagctcacagtcgtttcggggcattcttgtgcactcagttactctctctctctctggagcgtcgtcgtttcgttagggcacaaaaccccttttcggatcggtggagcaaggcctcgccggcgagattcccgaggctgtcaatcagcgatcgagcaccggcgaaaagcggcgaagatgaaggttttcgtgaagactctcaagggcacgcacttcgaaattgaagtgaacccttcggaca

SEQ ID NO: 91482 - DNA, 240 bp, Glycine max
  Clone ID: 700863031H1
tcagaagattggagtcgatgcggtttttttaccaggtgatgttcagaagaacattgatgaagttcagacaaagattaattcttctgctgcagaactttccagcaagactaaagaaaattcagagacaattaaagatgtatagatgcaatgcgactggctctggttattgttgctgctgttatgctctttcttgcatttctcggattcttattttcaatatttgggctgcaaggtcttgta

SEQ ID NO: 91483 - DNA, 246 bp, Glycine max
  Clone ID: 700863032H1
aacggcgccctcctcaaaggaaccattaccgttaacctcttatggtacggcagcttcaccccaatccaacgctccataatcctcgacttcattaactcgttaagttccaccgcgggggccccacttccctccgtagcatcgtggtggaagaccacggacaagtacagggggggatccactacaatcgtcctagggaaacaaatcctagaacaaacttattccctcggaaactacctcaacggaaca

SEQ ID NO: 91484 - DNA, 249 bp, Glycine max
  Clone ID: 700863033H1
aaccaccacacaattcctacacatttctactctttagtttctccaattttctttctcaattctcaacaatggccactacaacacaacttcacttaccccctggattcagattccatccaacagatgaagaactcgtcatccactactttgtcgcaaatgcgcttcgcaacatatcgcggttcccataatcgccgaaattgatctgtacaagtacgacccttgggaccttccaggaatggctttgtacgg

SEQ ID NO: 91485 - DNA, 243 bp, Glycine max
  Clone ID: 700863035H1
gcggttatatcttcgttgaggaggttgaaaccgaggatcgtgacggtggtggaggaggaggctgatttggacattggattggaagggtttgagttcgtgaaagggtttgaagagtgtttgaggtggtttagggtttactttgaggccttggacgagagttttccgcggacgagcaacgagcgtttgatgcttgagagggcggcggggagggcggtggtggacctggtggcgtgttctccggcg

SEQ ID NO: 91486 - DNA, 239 bp, Glycine max
  Clone ID: 700863036H1
gactgggccaatgaccggttcaggctagccaagtgcggcaaagggttcggaagacgggccaccggcgggctcggtggtcccatctatgtcgtcaccgataattccgatgacgacatggtgaaccctaagccgggaactatcgtcacgctgtcacccaaaaaggccccttgtggatcatcttcggacacagcatgatcatcagtttgaggcaagagctgatgatttcctccgacaagacc

SEQ ID NO: 91487 - DNA, 215 bp, Glycine max
  Clone ID: 700863038H1
atgggaattgcgcttcaaggcgtctcgtagggctaatccgcctcacgagggtcaccaacggcacgtgcctttggggggccgaggccccctactgctggtcggcaaacggacggcggcgcacgcgtcgcttctagcccggattctgacttagaggcgttcagtcataatccaacgcacggtagcttcgcgccactggcttttcaaccaagcgcgat

SEQ ID NO: 91488 - DNA, 238 bp, Glycine max
  Clone ID: 700863039H1
caggcttatctataaatgatgataatgaatcctcaatgtttccttcttctaagggaagtagatatatactaaatgagcagctggaactgtctccacagcaccttaatggcaatacttttgctgataaattaaggttttcaattcaacctacagggaggagccatcttcaggaagcattttgaactcatcagcaaagccttgggataggcaaattgggaataccgatttgcacgttacc

SEQ ID NO: 91489 - DNA, 237 bp, Glycine max
  Clone ID: 700863041H1
tcttcgtggcgagggaagaagggggcgaggaagatgatgggtacttggtgagttacgtgcacgatgagaggaagggggagtcgaggtttttggtgatggacgcgaagtcgccggagctagatgttgtggcggcggtgagcttccgcggcgggtgccgtacgggttccatgggctgtttgtgaaggagagtgagctgaggaaagtgtcgttgtcgtgaagctgagacatgatggttcg

SEQ ID NO: 91490 - DNA, 241 bp, Glycine max
  Clone ID: 700863042H1
atcctctgtcctctcgaagctttcatcgttcaacatattctcaccatctcagtcatgggcctgctatcttgttttaggtctaccgtcctgagaaaatgttccaaaggaagctctggcatgtcaagattcctgtatacgaacattttcaacgaaacttgatttcgtctggtggcaatgaatcgtattatgggtattttaacaggagatcatacacttcactttatatgggaactggaactgt

SEQ ID NO: 91491 - DNA, 242 bp, Glycine max
  Clone ID: 700863044H1
ttccaatatattccattctctctgtgtatttccctacctctcccttcaagatgcagatcttcgtcaagaccctcaccggcaagaccatcacccttgaggtggaaagctctgacaccatcgacaacgtcaaggccaagatccagacaaggaaggaatccccccggaccagcaacgtctcattttcgccggaaagcaacttgaggacggccgtacccttgctgactacaacattcagaaggaga

SEQ ID NO: 91492 - DNA, 242 bp, Glycine max
  Clone ID: 700863045H1
tctcgagccgattcggctcagtaaaagagaaagacaaagaaaaaacgagtgatgaaagcggagatgaaggatggagctcctcaagttgtgatgaatcataatggtaaccacggcaaattctcacacctacttgcttcccaaatcgtgactatcttctctctccaactggggctcaggtgaaagtttctgatcttgaagggaaagtagtgggtctattattcgctgcgaattggtacccacct

SEQ ID NO: 91493 - DNA, 239 bp, Glycine max
  Clone ID: 700863046H1
attggtgtataagacccaaaccattctcattttccatcaagcaaacgataagaaatgttatcagaaacattggccatccctgcagtactccttgtaatactcattttgattctatcctctgtcttgttccatcttcaagataaagaacaaatccaccaggtcctaaacccctcccaattattggtaaccttcacatgctggggaaactcccacatcgttcccttcaagcccttgccaaa

SEQ ID NO: 91494 - DNA, 246 bp, Glycine max
  Clone ID: 700863048H1
atttgtgtccttcacacttttcagaacacccagaagctctagcctcaccagcaccacatattgctagctagcgactccgagatgccaagcaaagaggattcacctttagtagaagcaaagcttccactattagaagctcaccctttaacagatgaaagagaacaagaccaaagtttcccacgaaggttttggcttgagtcaaagaggctttggcacatagtaggcccttcaattttcagccgtatt

SEQ ID NO: 91495 - DNA, 246 bp, Glycine max
  Clone ID: 700863049H1
gcaaaaacacatacagaacagaatctgagaaccagaccctctcaaaccggaaccgcaaatgaagcccaagagcattcgcatccgtaacttaccaacgcacctgctgctaatcgctgtttgtctgttcacctcttcgtccgcttccagatcggagaaaattgtgggtcagacaacaaatgcgacgctggactcagctgccaaacatgtcctgccaatggaaatacccgaccaagctgttcgcggaca

SEQ ID NO: 91496 - DNA, 244 bp, Glycine max
  Clone ID: 700863050H1
tgccatcaaaataatcgctggccctatcacattattgttaatattcttcccttctttaccttctactttccgaatccagaaaacaccacaacaccacccagaattgttgggttccattctcaaaacagagaacaagaagaagagaaagagagagagtgaaaacgggaaaagcaaaaagttgtttctgtgattgattctctgcaaccgaatcatcatcagccacttcttcccgtttcatctctcc

SEQ ID NO: 91497 - DNA, 241 bp, Glycine max
  Clone ID: 700863053H1
gctctctcttctttcagtttgtattttctaagaagacaaagcaagccatctcaatcttgaatcctccatcagatctccctgcgaatgctgctgcccaagaaaacaacccaaacccaaaacgcacccacaacgcagaaaacgggtcgtatgcaacccccaaatgaagtgcaagaaacatacctcagaccttagcagcaccgttggcgtctgcgcctcctgtctaagggaacgcctcatagcc

SEQ ID NO: 91498 - DNA, 240 bp, Glycine max
  Clone ID: 700863057H1
gaaagagataagcaaagcacgaataagattaatggagtctttggtgaaggggtctgctggtctggactaccttaggaatgcctttgctaacaaatatggatctccatctgatgccaatacctctctgccttcaacactgagatggatttcatctgtttggaattgcaaaggtcaggaatgggaagagcatgtgagttcctcatcaggattggcttctaattcatcccaagaatggcttcc

SEQ ID NO: 91499 - DNA, 238 bp, Glycine max
  Clone ID: 700863058H1
tggaaaatctcttgcctttcctgatggtctccttatcaatggccaagctcatacaaccataaatggggaccagggaaagacctatatgttcagaatctcaaatgtgggcatgtcaacatcaattaacttcagaatccaggtcatcctctgaagctagttgagattgaaggatcacacattgtccagaacacgtacgacacgcttgatgtgcatgttgggcaatcagctgctgtgttgg

SEQ ID NO: 91500 - DNA, 243 bp, Glycine max
  Clone ID: 700863059H1
aaaaaaaaaacaactttgcggctgcgctgctgctaatagcgcgttgcatctgctacctatcatacatattttcgccaaaccgccgattccgttgagcgtttctaccgtagcgctcaggaaggaggcagtggctggtggtgttgttgtggtggaggtggttttgctgatcatttgtggtagagggtaggaaagaaaaaaaagttgaaaatgagttcagacagccgcagcaggagcagaagcagg

SEQ ID NO: 91501 - DNA, 242 bp, Glycine max
  Clone ID: 700863060H1
tgcaagctgacccttcccttcctcatgctttatgggaatctgctgcctcggttttgtcaagtattctgcagtttagctctgaattctacttggaagttcctattgctgtattggtaaggttgcttcgatcaggctcagatacacagttgttggtgctttaaatgctcttttggtgttggaaaatgatgacggaactagtgcagaagctatggctgaaagtggtgctatagaggctctcttgg

SEQ ID NO: 91502 - DNA, 241 bp, Glycine max
  Clone ID: 700863061H1
gtaggattgtgaggaacaagaccacaaataaggaactcacaatagagtggaatttgaagggcccctctctcactcaaccctgtcaaaggtgtcaagcacattcttttgtttgtattttgtgagcaaagggtggtgtggtgggcttcttgtggttggtgttggggtgcgcaggataatcggcaaagtaaggtgaaggttagggagagaaagaatcaaatcaaacaaacaaccccatttaaaa

SEQ ID NO: 91503 - DNA, 195 bp, Glycine max
  Clone ID: 700863063H1
aaccagcaggagaaaataccaagatggaaactgatgaagctcctgccaatgttgctgcacctcctagcaccaatgacaatgatgttaacatgcagatgctaattccaaggcaactgctgatgcccctgggtccgaaaatgggacccctgaggcaggagataagcctgtgcaaatggatactgataccaaggttga

SEQ ID NO: 91504 - DNA, 241 bp, Glycine max
  Clone ID: 700863064H1
ctgtggcagaagtcctaggagtgtaaaacagagacgcaaaatgaagacgatcttgtcgtctgagaccatgaatattcccgacggcgtgagcatcaaggttcacgctaaggttatcgaggttgagggccctcgtggaaaactcgtgcgagacttccaccatctgaacttggacttccaacttattaccgacgatggcggtaaaaggaagctcaagattgattcttggtttggttctcgtaaa

SEQ ID NO: 91505 - DNA, 244 bp, Glycine max
  Clone ID: 700863066H1
gagtcattgaactttgactatatttttcagagttcagattattcttctcttttgtattttgattttgggggtttaagtttctgagagaaaaaaaaaaatgataaaggtcgttctttttttgttctgctttgcctctgcactgccctttcagtatcggagtccaaatctgcttctgtgcaacctcatgcagctgaatctttctctgttggatatattcagactgcagcgaactgttcttacctgg

SEQ ID NO: 91506 - DNA, 242 bp, Glycine max
  Clone ID: 700863067H1
aagagatgaaaacttcggtcacttgaagtcatctgatttccttacatatggaatcaaatccttatctcagaacgtgatacctttgttcaaatctataatatttgacttaagggtcacatcgagtgagttcgatagcttcgagaagtgcgtggtctctttgaaggtggaatcaagctgccaacaaatatactgagccaaattagccccttaccagtcctcaaggaaatcttccgcactgatgg

SEQ ID NO: 91507 - DNA, 235 bp, Glycine max
  Clone ID: 700863069H1
gtgtcaaggcaactaaagcttctctcgctttgcaagagagggaggagtgagtgagatggaaggagtgatacacagaacagtggaagtgaatggcataaaaatgcacatagcagagaaaagagagggtccagtggtgtgttcctccacggcttccctgagctctggtactcatggcgccaccagattctctctctcagctccctcggctaccgcgccgtcgctcccgatctccgtg

SEQ ID NO: 91508 - DNA, 236 bp, Glycine max
  Clone ID: 700863070H1
gccctatagtattcatttgtgggcaaaacaaagttcagtcaggatcaaaggagaaagaagaattcacaatgattcttccaaactttggacgtgttgctaagctgcctctttctctgaagcgtttgactgagggaataaaggggacaagacatcagaagatgatgaaattaacaagctcttctccaatgttttgagtatgcatccacctaaggatgagaatctgctggcaacattca

SEQ ID NO: 91509 - DNA, 237 bp, Glycine max
  Clone ID: 700863071H1
gcaaaattctcttccgtttcaggattagcgtttcaccgttacagtgaaacatggcaaaaccaaagcgaatctctctgcgtatctttgcgctgctcctcttgatttccacctcttcgtttcagcttctccgcgcttccgatacgccgatgatgatgcgatcttctatgattcgttcgacgaggattttgaagaccgttgggttgtgtctcagaaagatgagtacagtggtgtctggaa

SEQ ID NO: 91510 - DNA, 238 bp, Glycine max
  Clone ID: 700863072H1
gatcagatcctcatcttctaccatttcaggtgctcactttcttcgcccatttttatttgtttgttgttttaacaaaacccataatcagatccgatcctcttgagattgggatcaacgccgagtccatgagcacgccagcctttcagggggcacgggcctcttctctgggttcactcggttatgcaagggccttgcggtggtgcttgtttgcggtcacattgcggttcagtttttccct

SEQ ID NO: 91511 - DNA, 238 bp, Glycine max
  Clone ID: 700863074H1
aaagaatcatagaagatggtactgcaaatcaaaatctaggaaacaaagaatcatttccagagagatacgatgttgatgtacaatgtttatctccaaaaaagcaatgtactgtgtataaatatgacgcatttgtccctgtgttggcaagccagtcgattcatcttggaatacattaacacagaaagataaagatgctctttctaaaggtgcagattgttttcctagcaagacttgtgat

SEQ ID NO: 91512 - DNA, 241 bp, Glycine max
  Clone ID: 700863075H1
ctttctgatctctctccccctctctctaacaataaccctcgctgtcgctggttccaattcaccatgaccgtgatgatgcccgctcccattgatcagcaagaggacgaggacgtgctcgtgccggacgcggatttgcctgagacaatcaccaacccatggaagttgtagctcaacctgaaaatgccaatactgtggagagtcagcccgttgaagatcctccgtcatctagatttacatggag

SEQ ID NO: 91513 - DNA, 242 bp, Glycine max
  Clone ID: 700863076H1
acttggacaggcgttgactgcgttgattaaccagggagctggattggggcttgggaatctgcttggagggcttgggggtgccccagttaaccaggcgggacctcctgctccgtatgcgaatcagcctgctatgagggtatgggaaccagccagcaatgcaacccggataccagaatcctcaaatgggacagggcagtggtgtgagacctcatcctggtgctggtgctccttacatgggtcat

SEQ ID NO: 91514 - DNA, 240 bp, Glycine max
  Clone ID: 700863077H1
ctcatctctctctcgccggcgtcgctacgaaggaaagcaatttactgtgaagaacaatgaggaagctaaagtttcatgaaaagaagcttttgaagaaggttaattttttggaatggaagagggaagggggtcacagagagacctcattatgcaacgctaccatgttactggacgggacgattacaaaaaatattcaggtttatgccatatggttcagaagttagtaaacatattgaaaca

SEQ ID NO: 91515 - DNA, 240 bp, Glycine max
  Clone ID: 700863079H1
gcaaaacaacaactcaattaagaaattcttctccggagccatggcagatctcaagtctacattcttgaacgtctattccgttctcaaatctgaactcctccacgaccccgccttcgagttctccgatgatgctcgccatgggtcgaccggatgctagactacaatgtgcctggaggaaagttgaaccggggactgtcagtcattgacagctacagattgttgaaagaaggacaggcatta

SEQ ID NO: 91516 - DNA, 236 bp, Glycine max
  Clone ID: 700863080H1
gcttgtggccatagtctcattatttatccttttgcttccaaatatccatgggtggggagacgatgggcatgtcattgtttgcaagattgcacaggctcgcctcagtgaagcagctgcagaggctgtgaagaaactgtgccaatatccgcaggaaatgatttgtccacaaagtgttcttgggcagatcatgttcatcatatctatccttgggcctctgctttgcactacgcaaatac

SEQ ID NO: 91517 - DNA, 241 bp, Glycine max
  Clone ID: 700863082H1
attctttgagggaatttgacaaaaaagtagccactgccccaacgatcccatttcccttgacttctctacgtgaagctccttgttttgcataggagctagttgaaatgtccgagggaaatgcagggaaaggaaagaaaatcgcatcattggtgtctcaaccttattgttggtggctatggttgtggcggtcacaattggggtcaatctcaatgagaatggttccaacaatgatatagaggac

SEQ ID NO: 91518 - DNA, 240 bp, Glycine max
  Clone ID: 700863083H1
gggaggtgggaatagcgtgggaccgacgaagcaaagcagatagaaacataaaatttccatggcgtgacgggggagagagccaaatcgaactgaaacgtttcgaaattcattttttttttctaacatacttaaagagagagaagagagagagagagaggggagggttgcaaattccatgagagcagaagaggtgcctcttactcgtctcgtctttcaccgttacgagtgagttcgacccct

SEQ ID NO: 91519 - DNA, 239 bp, Glycine max
  Clone ID: 700863084H1
tcctacaccaacaaaaatggcaccttctccacaagaaatcatcttccgatccccactccccgatattcccatccccacacatctcccattgtactcttactgcttccaaaacttgtcaaagttccatgaccgtccatgctcatcgacggcgacaccggcgagaccctcacctacgccgacgtcgacctcgctgctcgccgcatcgcctccggcctccacaaaatcggcatccgccaggg

SEQ ID NO: 91520 - DNA, 236 bp, Glycine max
  Clone ID: 700863085H1
aagttcgatgagcacgctcctccttttgctaaacacattgcggatcaagccaagggtgtgattcagaaagtgacttgtgaggcagggaaagtagcaagtgaagcacaatctggggggccaagagcagctgttcattatgttgctacagaatcaaagcattttgtgttgataaattcagtaaagttgtggaatggactcaaccactatccaccattccatgcactgtcagagatggc

SEQ ID NO: 91521 - DNA, 236 bp, Glycine max
  Clone ID: 700863086H1
tttgatttctctctcctcgactcgatcccaattccactagggattcaattccgatgcgattccgagcttgttagatccacgacaaggtttcgtttcccagattcttttgtaaaaaaaaattcttcctctgcccaacaggaagttgtaaaaaaatggaccatgacaagactgggtgccaagctcctcctgaaggtcctatattgtgcatcaacaactgtgggttttttggaagtgca

SEQ ID NO: 91522 - DNA, 240 bp, Glycine max
  Clone ID: 700863087H1
gcgaacacatgactgatctgcaagaaaagttcaagcgcatgtgtgaaaagtccatgataaagaagcgatacatgcacctgacggaggagtttctgaaagagaacccgaacatgtgcgagtacatggcgccatcgctggactgagacaagacgtagtggtgatggaggtgccgaagctgggaaaacaagccgcaacgaaagcgattaaggagtggggtcaaccaaagtcaaagatcacaca

SEQ ID NO: 91523 - DNA, 240 bp, Glycine max
  Clone ID: 700863088H1
ctgaactttctaatgtcaaacgttggactcaaggaacctatgctttcatcagggttcttttgagttccaacacctttgctttggaaattgattccacctgatcaagtgaaagagattcttcaggcttcatctttgtttcttcacgtaagaacattgctctccggttttgtaacttaaaatattaccataattttcgttgagtttaacatgtagccttcattggtgccaataacatgtagt

SEQ ID NO: 91524 - DNA, 242 bp, Glycine max
  Clone ID: 700863091H1
acatgctcatgtttggaagcgaaggaagttgcagtacttcctctgacggaagctgcactcaaggcagagaaattatcaagcaagaagaaattggttaccacagctacaataatgattataactttatgcttaatcacagcacaatattaatgatggagaaaagtcatgttttggtgagtggtttagccaaacactactaacaccgttggattatgatcttgaggatattaagcaattgatta

SEQ ID NO: 91525 - DNA, 240 bp, Glycine max
  Clone ID: 700863093H1
ctaattcagaaggcaaaagaagggatttctccactttcaccaattgggatattatctaagatacacaagattggaagccatcttgggcgtgggaaggaagaagacgctcatgaatttttgaggtgcgcggttgatacaatcaatctgtttgtctcaaggaagttggtgtttcaagtcctttggcagaagaaacaactctagttggttacacctttggagataaagtgcttaagatgcctg

SEQ ID NO: 91526 - DNA, 234 bp, Glycine max
  Clone ID: 700863094H1
gcaggaccttgagaatgaaaagcatttgcaagaacttgatcagaaggcaaaacttgaggccaagcctttgaaggagattcttgcttaattaataataattacatatgtatcatttgcatgcccccttggtgttttagtattttttaagggccatgaattaataatagtccttacctttgtgcttttgtacgtcttatgatttatcctttgtggggatatcatgtgttgtgttca

SEQ ID NO: 91527 - DNA, 241 bp, Glycine max
  Clone ID: 700863095H1
ttggccaacggttaacttccctccgaacctagagagagtagtagtctcttgtaatcaaagcaaagttcagtagtcgattcttggtcaccttctgagactctaacttcaccttcctgacatacccttcataccaatcttcctttctgtttccttttcctaccttccttctatatacacttcatctccacctcttcttcacactcactagattttttcacctccaagtctttctgttcactat

SEQ ID NO: 91528 - DNA, 234 bp, Glycine max
  Clone ID: 700764551H1
gaacattgcacctgcaacgtcaacttcacttctccgttctaacactcgccatgttccttagcaagacatggagacagacggctttcggtgtttttaggtacctgaatttcaccaaagctggcttccttgatcattctaagaaattcaacccagaggacatggaattacgaataccagggaagaattgcattgttactggagctaactctggaattggctatgcaacggctgagg

SEQ ID NO: 91529 - DNA, 234 bp, Glycine max
  Clone ID: 700764558H1
tagggcgtatggtcgacgcgttgcgagtacctattgatggaagaggggctctaagcgatcacgagcgaagacgtgtgcaagtgaaagcccctgggattattgaacgtaaatctgtgcacgagcctatgcaaacaggcttaagagcagtagatagcctggttcctataggccgtggtccacgcgaacttataatcggggaccgacacactggctaaacagctattgctatcgata

SEQ ID NO: 91530 - DNA, 231 bp, Glycine max
  Clone ID: 700764559H1
cagactcgtgaacatgctctgctttcattcacccttggtgtgaaacagatgagttgttgctgtaacaagatggatgctactacaccaaagtactccaaggccaggtatgatgaaattgtgacggaagtttcttccgattcgaagaaagtaggatacaaccctgacaagatgccttttgatcctatatctggttttgagggagacaacagagtgagaggtccacaaaccttg

SEQ ID NO: 91531 - DNA, 82 bp, Glycine max
  Clone ID: 700764561H1
ccaatttgcagagtggagtctgcttgcggggcgcactgtgactccgtaggcgctcttcaaccgtctaaaacaccaccctcgt

SEQ ID NO: 91532 - DNA, 237 bp, Glycine max
  Clone ID: 700764562H1
cctttccttggccaaccttatttcggtccaaatgagattgggtatgttcgacggcgaaccgtcaacccaaccatacggaaacctaggcccaagagatgtgtgcacctcggcccctcaataattggcccttgaagcagctagcgcgtgtatagtcttactacatgacataggtaactccctaccattcatcccctgtcaagacttcgtactatacgtgtcggtggacccaatactgat

SEQ ID NO: 91533 - DNA, 238 bp, Glycine max
  Clone ID: 700764563H1
ctcattgctttgctcacattcaatttcgaaggcgtagagtgagatccgaacgatgaagagagtatccggcgtcaagaagaacaaggatccacccccttccattcaggatgcttccgaaaggattacaaaacgaggtgacacggtggatgacaagattaagaagcttgatgccgagccccgtagatataaagagcagattaagaaaactagacctggtcctgcccaggaagctgttaaa

SEQ ID NO: 91534 - DNA, 61 bp, Glycine max
  Clone ID: 700764565H1
gataattgaaatgtgagagtgagaaggagagagcgagaattcggaaaggctaatttcggaa

SEQ ID NO: 91535 - DNA, 229 bp, Glycine max
  Clone ID: 700764566H1
cagtcatgcgatgcatcactactgttagcgacggtgaacgatgtagtgtcggagcaggcgtcggatagaagtgttgggatgagaaaccgcaagtacgtaaacaccatcaaagcagcggttgagaaagaatgccccttgacggtttcatgcgctgacattcatgctctttctgctaaagatggcattgccttcttcggaggaccaagcattgacatgaagacagggcgaa

SEQ ID NO: 91536 - DNA, 234 bp, Glycine max
  Clone ID: 700764568H1
attctcttcagtttaaagttacatagtttgtcaatgtgttacttaatctacaatggctgcttcaacagtggctctctcttcatcatcagtggctggtcaagctatcaagcttactcccctccaaccctgagctgtgtgttggacgggttagcatgcggaaaacagcctccaaaactgtttcctcaggaagcccatggtacggacgagaccgtgtcacatacttgggcccatgct

SEQ ID NO: 91537 - DNA, 223 bp, Glycine max
  Clone ID: 700764569H1
caaacatcgaggaggagatgggtcaactgttgcaaattgctatggcgtgcgcttccgccgtgctggatcagaggcctagcatgctagacgtggtgcgtatgattgaggacattatccgtggcgaggcttatgatggcttgggataagcggcggatgagccttcctaaggatccgagggtcaggcaccagccccagagtcaaggactccaactagggcactcag

SEQ ID NO: 91538 - DNA, 223 bp, Glycine max
  Clone ID: 700764570H1
gcggcttctttcgccaagattaagtttcaccagtaatgggtaagccgaaggttcacatgaacatcgtggtcattggccatgtcgactctgggaagtcaaccaccaccggtcaccttatctacaagctcagaggtattgacaagcgtgtcatcgcgagattcgagaaggcagctgctgagatgcataagaggtctttcaagtatacctgggtgcttgacaagct

SEQ ID NO: 91539 - DNA, 230 bp, Glycine max
  Clone ID: 700764571H1
tgtgattccagaccttaatttttctctcattcgcttcaaatgtcaggaaatcaagtatggctcaaccctccacaagagtaggccttgctggactggctgttatgggcccaaatctagcactcaatattgctgagaaaggctttcccatttctgtttataaccgaaccacttccaaggttgatgagactgtagaacgagcaaaacctgaaggcaatcttccagtttatggc

SEQ ID NO: 91540 - DNA, 235 bp, Glycine max
  unsure (1)..(235): unsure at all n locations
  Clone ID: 700764572H1
cacacttccacgtcaccaacaagggaatggaaggtngagcgtgaggctgtttccggtaaccgctcccggcggcgctgagtcgtgatcaaggaaatggggcagacgctgagttgcgtgcaacagcacgaggaccatggtgtgctcttccctgcacttgcaaatggagaattggagcttgttgaggccatggtggagggagaccccactgtgttggaacacaccattggctgtgaca

SEQ ID NO: 91541 - DNA, 233 bp, Glycine max
  Clone ID: 700764576H1
gatggagtgaactagatgctgcaattttagtacgaggagacatattcagcatcaagttaggagagatcattccggctgacgctcgtcttcttgagggtgatcctttgagtgttgatcagtctgctttgactggagaatctcttcccgtaacaaagagcccctcggatgaagtgttttcgggatcaacagttaagtagggtgagatagaagcagttgtgattgctactgggggg

SEQ ID NO: 91542 - DNA, 235 bp, Glycine max
  Clone ID: 700764577H1
cgtatatccattggagaagttgaccgtggaaggcgagttttaccgcaaatcatgctttaggtgtgcacatggaggatgtttcctgaccccttcaacctatgctgctctagatggatatctttactgcaagccccacttctctcagttgttcaaggagaagggtagctacagttatctgtccaagcaagcttcattgaagaaaagtgaaatgcaacaacaagaacgcgaggctgtg

SEQ ID NO: 91543 - DNA, 234 bp, Glycine max
  Clone ID: 700764578H1
attgaactgaaccttaaattaattatagaaccatgtttgcacataccaattcctccactttgtcacctttattctctttcagtagaacaacagcaacctctctgccttccaaacccacattctggaatttggttccaatgaaacaatcttcttctccggggcacttggccttagccttagacaatccacgtagaacacttcacgtgtcttgtggctccacatcaccacatgctt

SEQ ID NO: 91544 - DNA, 236 bp, Glycine max
  Clone ID: 700764579H1
ctcagccattaccacctcttcactctttctctctcttcccaaactaaacataaagctacattacacatttctagggttctctgacacaccaagattctcctagctgcagctgaaggactgtgaagatgttggagagcgttgaagaatttaacacggagaggatgatggaggaatttgagagggtgacaaaggatgctgagaggattcaaagggaaaccctgaagaggattttggaa

SEQ ID NO: 91545 - DNA, 70 bp, Glycine max
  Clone ID: 700764580H1
caacgttcacataccacgtagaaacagttcaatcatgcttagcgctgagcagacttcagctactcatcca

SEQ ID NO: 91546 - DNA, 232 bp, Glycine max
  Clone ID: 700764581H1
caaacctaaacaaccccttttgcctaaagctccttccttttctccaatggcaacctgggttttatcagaatgtggcttaaggcctcttccaccagtgtttccacgctcaacaagacctctttcgtgccaaaaaccttcaaagtctagatttttaagcacaaacaagggtgtgccagatctgaatctccaagcaagagggttaacatgctgtagttttaaggatagatagtgg

SEQ ID NO: 91547 - DNA, 230 bp, Glycine max
  Clone ID: 700764582H1
caagatttctgatttctatgtgcagaaaggtcgtctatcagaggatgaggcacgattctatgcagctgaagttgttgatgctctcgaatacatacataatttgggagtcatacagcgtgatattaagccagagaacttattacttacagctgccggacatattacaatagccgattgtgggagtgtgaagcctatgcaggatagccctataactgtccttccaaatgcag

SEQ ID NO: 91548 - DNA, 202 bp, Glycine max
  Clone ID: 700764584H1
ctcgagccgattcggctcgaggggccgcaccgcagtcaacgtcgctagaatctacgatccaattaccagcacgtctcaagtaagaccgccggtgcactgactcgagatgttacggtctcaaaggaggccatgtggaatcggtacacatcaacagaggtctatgcaagcgtcacttagagctgtaacctctgcggcgaataat

SEQ ID NO: 91549 - DNA, 232 bp, Glycine max
  Clone ID: 700764585H1
attccttgaagcctatgctgctgcctcgcaatgggaagagtgccgccaatgccactggggcttctctcaaattgccgcctctggcctcttactctgatgtttatggtgatttgattaggcagaaagagggcaactgtgccctctgcgctcaccaatgtggttctggacattaccgatgtacacaggataattttattatttgtgcaaattgtgtcaaaagtgggaattatgg

SEQ ID NO: 91550 - DNA, 217 bp, Glycine max
  Clone ID: 700764586H1
ggggatgtgcgaagaacacagaacgacgcaaatccaagactgaaagtttctagattcgtcacctgcgaattcaatatgccccacaaattcatggcgttcttgtatatctcctgtgaatccatttcagataatttgcgtggctctgggtgctttcgggacttaggaggtggagacatattttgtgataagccgatacccaatttggatcagtggtttg

SEQ ID NO: 91551 - DNA, 234 bp, Glycine max
  Clone ID: 700764588H1
gaattgttgatcagaaaaggttgagggtgaagaaagagactagtgaaaagcaagtatggggatggactactatgggattttggaggttgacaggaatgcctcagatgaagagttgaagagagcctacagaaagcttgcaatgcaatggcaccctgacaagaacccaaccaataagaaagaggctgagactcaattcaaacagatatctgaatcctacgaggttcttagtgatcc

SEQ ID NO: 91552 - DNA, 231 bp, Glycine max
  Clone ID: 700764589H1
atgtgaactctgaggatataaaggaaactggatacacctatattatgccaaagaacattttgaaaaagttgatatgcatagcagatcttcgaacacaaatttctgggtacatgtatagcgtaagtcctccagataatcctcaggttaaagaacttcgctgcattgtgatgccaccacaatgggggacacatcaacaagttcatctgccatcagctcttccagagcatgatt

SEQ ID NO: 91553 - DNA, 232 bp, Glycine max
  Clone ID: 700764590H1
cgaacattgttgaggtgtttccactcatcctaattcaccaagcagggctcctgcgtcgacctctgcagctcagaggggggatgatgactcaactcctacaattgatgttgccaatctgtctccaactcctgaaactggagaagaatcatcgcatccgactgtagtggcgcctgttcaagcagaacaggtatctgcgtccggctctggaactactgcgctagcgacagcgcaa

SEQ ID NO: 91554 - DNA, 234 bp, Glycine max
  Clone ID: 700764592H1
tggaacctccgagttggtttcgccagagcggcctaacaagacagctaggagattatataaggcatgtttgaataagcttgtgagtgtgtggtaaataagctttctggaactactatggcacaggtttacattatagatctcaagaatgtacttgtgaaactatgcaccttgatgtattgtgttgtatttgaagggaccatttgcattaaaaaaagtggaaaaggggggccgccg

SEQ ID NO: 91555 - DNA, 233 bp, Glycine max
  Clone ID: 700764593H1
agaggatgggtgcagaagcaaatggcggcgagaagcaattgaaatttctgatctacggtcgcagcggttagattggtggtctactggataagcgctgcgaagagcgcgggatccaatatgagtacggcaccggcagattggagaaccgctcgtcgttagaggcggacatagcggctgtgaagcccagccacgtgttcaacgccgcgagtgtcacgggtagaaccagtgtggac

SEQ ID NO: 91556 - DNA, 233 bp, Glycine max
  Clone ID: 700764594H1
gttgctttctgtggaggtggtgctcgaggggaagctagggtcgagtcgagattcagggaacttcgcctccactccaagtagcttgtaaaaaagaagtggctgtttggaatcctggatgattttatcacaaagcaacttccacataatgtgacgttgcggctgagcttaatatatgccatggaacacacgggagatcgcgcatcagtaacgactcagggggagctggcacatgc

SEQ ID NO: 91557 - DNA, 226 bp, Glycine max
  Clone ID: 700764596H1
tcggctcgagcaaacaatggagagatctagatgatgagtgcgatttgtgggactgcgctctctcccaaccacgtcttcaaaccaggggacacacattcaatttgtaaaggaccatactccaatctttgtgtacccatggttgtattggcaacagggcctggtataggaggttgggtgctggaaaagccagttattgaaaaagtcacccctagccgtgagtctgaat

SEQ ID NO: 91558 - DNA, 157 bp, Glycine max
  Clone ID: 700764601H1
ctcagtgaaagagaatccgaggcgaagagaagagaaaaattaagatggaggggaaggagcaggatgtgtcgctgggagcgaacaagttcccggagagacagccgattgggacggcggcgcagagccaagacgacggcaaggactaccaggagccggc

SEQ ID NO: 91559 - DNA, 149 bp, Glycine max
  Clone ID: 700764603H1
gtggaattcatgcctttcagtttgtccttctttttgaccataaatgctgtcatgtggttcttctatggccttctcctcaaggactactacatcgcactcccaaatactcttgggtttctattcggcataatccagatggtgctgtattt

SEQ ID NO: 91560 - DNA, 143 bp, Glycine max
  Clone ID: 700764604H1
gagaaaagttagggttcacaacttttccttttccttttgcttgcgaatctgaatcaaataatcaatcatccattcattattcatcatgtcgtcggcgaagaaaatcacgctgaagagttcggacggcgaggctttcgaggtgg

SEQ ID NO: 91561 - DNA, 145 bp, Glycine max
  Clone ID: 700764605H1
gaacgagagagagaggttaggctatggctgatgacagcgttcttgagtccccagtgaacaggcagagagatgatggtgaagaaaatggtgtctctgtttccatggacgcggagggtgacgaagaccctcttagtaacggtttatc

SEQ ID NO: 91562 - DNA, 93 bp, Glycine max
  unsure (1)..(93): unsure at all n locations
  Clone ID: 700764606H1
ggaattcggctcgtgctctgagtgactcggtatggcggcggtatcgggtggtacgcagacnatctttgatctacccgaggaggtggtgcaagt

SEQ ID NO: 91563 - DNA, 159 bp, Glycine max
  Clone ID: 700764608H1
attcggctcgtgggaggacattcgcttcatggtcattccaggactgatggatggcatgtctcttcttgccaaatatggtagatattagtaggctatatgtattgttaagtgtagaaaggttctcaagttatacaggggatgcgtcatcatctcggttgt

SEQ ID NO: 91564 - DNA, 145 bp, Glycine max
  Clone ID: 700764610H1
gatttgtaggcttctgtacattctatcaagagtcgatatcccaagatctcaagtttacgtgaatttttcattgccaaataccaagaaaattctccgagttttaaacttgcccagaggaacttcgttgaaagtatggccggatatt

SEQ ID NO: 91565 - DNA, 148 bp, Glycine max
  Clone ID: 700764611H1
cagaacgatgaggatggtaaggtggaggatgtcaatgaggagaaggagaaggaagaaaaaacacaaaagaagatcaaggaagtgtcacatgaatggaccttggtgaacaagcagaagcctatttggatgaggaagcctgaggagatca

SEQ ID NO: 91566 - DNA, 152 bp, Glycine max
  Clone ID: 700764614H1
aagagagatagggagagcgagcgtgagaggaagatcttcgatttagggttttcaatttcgtattcagcaaggcggcgagttgagagatttttagagagagagaggtgagaacgctgagtgctctgctgagagattccattgccccaagagaa

SEQ ID NO: 91567 - DNA, 164 bp, Glycine max
  Clone ID: 700764615H1
cggctcgagtacagattaatgtatctgtgattagacttgaattgaaagtacgctactatttaaatgattcgtgaatatcgtaatcactatacaatctccttcaaaagagatcaatgtagctagctcgctcttgactgtatgatggtttacacccatgtatactg

SEQ ID NO: 91568 - DNA, 156 bp, Glycine max
  unsure (1)..(156): unsure at all n locations
  Clone ID: 700764616H1
ttctactactaccttacttggtaactttcataacctagnantaagagcgtctcagattttggtaacaatgctggccattggggcacatggcactagtatccgcacaagctctacttgcactgctttgctcagagaacttgagcaaatatggaacga

SEQ ID NO: 91569 - DNA, 169 bp, Glycine max
  Clone ID: 700764617H1
gcgtacgtaagcactcagctcgaggtcatcactggatttggcatcgactctctttgacgtctcttgctacatgatgtacctctgattgaagttccttcccgcttattcctggctgggctctacaattcgtccataccggctcatggtcactcggtttctaacgggagac

SEQ ID NO: 91570 - DNA, 141 bp, Glycine max
  Clone ID: 700764620H1
ggctcgagcgatctcggctcgagtgtgtcaggattagcaggtgcgtcgctctcgaacgcagctgtagaatttcggtcaacaggattcgtacgtcaggcttctgatggcgtccgaagaggatggggcccgtttctgaaggga

SEQ ID NO: 91571 - DNA, 142 bp, Glycine max
  Clone ID: 700764621H1
cttacttgcatgttatttgatcaggtgaccagcagccagaatagtaaaggagaacaacttgatctaggtgtgaggcttggtttgctgaaattagtaagtggaatatctggcttgacacaagatgatctcccagaaactttat

SEQ ID NO: 91572 - DNA, 135 bp, Glycine max
  Clone ID: 700764622H1
gagcaactcaccatgaatgatcggcgtggaccacccccggccgcactatcaccaattgatgcaatgcctactattaagataacacaggcgcatcttcgcttggattcacactgtccagtttgtaaagaaaaattt

SEQ ID NO: 91573 - DNA, 142 bp, Glycine max
  Clone ID: 700764623H1
acggccatgatgaaaatcctcttcattcacatcggggaatgactactcagattcatgtatagggcaaaacgtaagagacatcgacgcattacaaatgttgataatagatatgtttgaattagaattataggtgattttattt

SEQ ID NO: 91574 - DNA, 87 bp, Glycine max
  Clone ID: 700764624H1
gtgtccaattccgacaaattgaggctctactcgacagaacaactacccatgatttcaatcgaccttcgattcctcttccgcatcaaa

SEQ ID NO: 91575 - DNA, 143 bp, Glycine max
  Clone ID: 700764625H1
gtctgaaataaaccagagccttagaggaggagtttctggttggacaatagcagaggagaaaatcaggcctaaatgtacaactcatcaatttgcagttttatggttagtactaatattttgcagcctaggatggtaattgcgag

SEQ ID NO: 91576 - DNA, 143 bp, Glycine max
  Clone ID: 700764626H1
accaatttactagggttgtatacattttccgatggcttctgcagatgttgagtaccgttgctatgtcggtgggctcgcttgggccactgacgaccatgccctcgagagaggcttctctcagtacggcgaaatcgttgaaacga

SEQ ID NO: 91577 - DNA, 123 bp, Glycine max
  Clone ID: 700764627H1
aaataggggatagaactttgaactatcgggcggtggagagtatgagcttcggatctatgtgtacctaagcccagtccgtatcagctcaatctgctctgcgacgccattcactagatctgcagt

SEQ ID NO: 91578 - DNA, 154 bp, Glycine max
  Clone ID: 700764630H1
atttcagtggttttttaagttttgtcttttctatggtgcagtcttatattgtatacttaggatcgacattctcatggcccaaacccttcagcaagtgatctgtgagtctgcgacgaattgccattacaaattattatgctcacacttggggaag

SEQ ID NO: 91579 - DNA, 153 bp, Glycine max
  Clone ID: 700764633H1
acacaactagccttcttcaagtgttcttcctctttaatttctctatagaatacttacccttttctcaagactaacctctcgatccttctcaaaagaagaaaattaaaatggcaactgaaaagcttagaggttgtgcaaagttttttgcaagct

SEQ ID NO: 91580 - DNA, 148 bp, Glycine max
  Clone ID: 700764635H1
caccagtcaccacctctgaactctctctctcatctataagtcaacatggcgacatcatgacgattcaagtgcatggaattcgagtaaacctcaccctaagctcaatgaaagaattctgtcttctctgtcacggagaactgttgctgct

SEQ ID NO: 91581 - DNA, 142 bp, Glycine max
  Clone ID: 700764637H1
ctttcattcctttttttttactcttggaaagcgtagttcggtgttggagaaccagcttccagttccagaatactgctgaacagagttcggcttcgctttattgggactcagttgtgtttctactaggttatcttctctgaat

SEQ ID NO: 91582 - DNA, 137 bp, Glycine max
  Clone ID: 700764638H1
taacacgctatggcggcggaatcgggtggtacgccgacaaactttgatcttcccgaggaggtggtgcaagtgctaccgtccgatcccttccagcagctcgatgtggctcgcaagatcacttgcattgctctatcgac

SEQ ID NO: 91583 - DNA, 140 bp, Glycine max
  Clone ID: 700764640H1
ggcagtgacaatagatgtgcatccattgggtacgtggatgtgcacgtgtgggaatttggagtgcatgatgagccacattcagagggataaaataatggttcttatgttgacttggagtggggtcgtctaatctgttgggg

SEQ ID NO: 91584 - DNA, 143 bp, Glycine max
  Clone ID: 700764641H1
ctcataacgcaaagcacaaagcaaagctcatccttgagttaaaaaatggcagcagcttcttccatggctctctcatccgcagccttggctggcaaggccgtgaagctgggcccatcagccccagaagtgggaagggtgagcat

SEQ ID NO: 91585 - DNA, 144 bp, Glycine max
  Clone ID: 700764643H1
atgtggatcaaaatatttaccaaattccgcaagagccacactgcattgattgtccaagactgcctgactcttgggtgcgtacggggatgattattgattcagatctgcaacaagactcaactacaacggagacggaattactat

SEQ ID NO: 91586 - DNA, 144 bp, Glycine max
  Clone ID: 700764644H1
cgcgtcgctgctccgtaccagtttcactgcataaatttgagagacaactctgcaaacatgttggtttatcatgacctccttacaggcgatgagcttctctcggactccttccgttacaatgaaattgagcatggaatgctgtgg

SEQ ID NO: 91587 - DNA, 142 bp, Glycine max
  Clone ID: 700764645H1
ttcagatttttctcctgggaaaacgtgttcaaaatttgttcgcgtttagtaatacagaaatgtcttagaagagattttgaacacggtttcccaggagaaaacgtgttcaaaatttctttgaagacatttctgtattactaaa

SEQ ID NO: 91588 - DNA, 148 bp, Glycine max
  Clone ID: 700764647H1
caacgattgatggtgtgtcacaccaccgaagaaggcttcaggaatctacatagcttttgcctcagagcgttgaaaattcccagagtctctcgcttcgtcaaaatttcgccctctgtcattcaattctcttctctgctcgtctcttctg

SEQ ID NO: 91589 - DNA, 144 bp, Glycine max
  Clone ID: 700764649H1
ataccaatatttaaagacgagtaggtttcatgtgtcatgggacaagatatttctttgatggaattcttttccccttattcctgtttgttttttcaattcatccatgcctgctcattgtaaacgattttatagctgtttgatgaa

SEQ ID NO: 91590 - DNA, 147 bp, Glycine max
  Clone ID: 700764650H1
ttcaaagttagcattgcagtacagcttgttaaataaggcaatcacatcagtgcttgtaggcatgaagtctgttgaacaggtggaggaaaatgttgctgccgcaagagaacttgcaacttctggaattgatgaagagactctgtctga

SEQ ID NO: 91591 - DNA, 146 bp, Glycine max
  Clone ID: 700764651H1
taataataaacctatattctaaagccggccaaataccaaaaggaataacagcacatgtctggaaaggtaattatctcggctgattctctcatcctggtgcttagagtagccatatgtatagttctgaccgtcaacaatacgggcga

SEQ ID NO: 91592 - DNA, 142 bp, Glycine max
  Clone ID: 700764652H1
atcagatctaccacctcgcgtgtcccgcgtcgccggtagcactacaaatacaaccccatgaagaccatcgacgaatgtgatggacacgcttaacatgcttggccttgcgaaaagaattggggctaggtttctgcttactagt

SEQ ID NO: 91593 - DNA, 140 bp, Glycine max
  Clone ID: 700764653H1
ggcgaagggtgaagacgctttgattcgcaagaagactaataagcttcgaatgaagaacagcagcggctcttcctctgtctccgccaaggttgccgtcgtaatcgtcggcaagacgcgccgtaatgccggtaaacgccgct

SEQ ID NO: 91594 - DNA, 140 bp, Glycine max
  Clone ID: 700764655H1
ccttggatgaatctcaatctgaatcagtcctcctcctcgtcgtatcaggaataaataatcatcggaagaagaatcaggtatggatgttgggaccgtgctgctactttgttgggtgactctgatcccggggattttatcag

SEQ ID NO: 91595 - DNA, 90 bp, Glycine max
  Clone ID: 700764656H1
attcacccttcacacgtggtggtggtgttgttcttcttctcttcccctttctttttcttcttctgagcttgtttaagctctttctatttg

SEQ ID NO: 91596 - DNA, 139 bp, Glycine max
  Clone ID: 700764657H1
caaagtttcttcctttctctgctctttgccttctctgactcatttggtgccttgtagagcgtgttttggcaggaaggtggtatggcgaaggacgttgaggttgctgagcgtggctccttctctgggaaggactaccagg

SEQ ID NO: 91597 - DNA, 140 bp, Glycine max
  Clone ID: 700764658H1
actaactcctcttcacacattttcttagctctctccaacaatccctctcgttcacatgattcagattgtgtgaagatgggggctggtggtcgaactgctgttcctcctgccaacaggaagtcagaggctgaccctttgaa

SEQ ID NO: 91598 - DNA, 140 bp, Glycine max
  Clone ID: 700764659H1
atggtgatgaaccaccatcaagatatgtagttaatggaaatagctttggatctaaagattcttctgtacagtttccaatacccatcattgatgtgcgtctcctctcatcagaagatgagctagagaagcttagatctgct

SEQ ID NO: 91599 - DNA, 145 bp, Glycine max
  Clone ID: 700764660H1
ctagtaacctcttgttggggcaagcagtcaaaaaatgaaccagagcaaatgaaattcgaatggctattcctcacgattgctccttgcgcggcggtcaccattaacagtccgctggatcgatttgagataatcccattgattgata

SEQ ID NO: 91600 - DNA, 102 bp, Glycine max
  Clone ID: 700764661H1
cgtagtacgtcggcttcggctcgaggaaggctgaggtggcaaaactaagtgttggaccaccagaggatgactgtgatatcaccccggttgtgtcagaatcat

SEQ ID NO: 91601 - DNA, 146 bp, Glycine max
  Clone ID: 700764662H1
agcatgtgaatgcgaagtgtgtctctctccgaattcagcaacctcgttgaggactacaggtgcagctcatagtgccagcttgctagagctggaagttgctgactagagcatgagctgcgttgaaattcttggtgtatatagagggt

SEQ ID NO: 91602 - DNA, 145 bp, Glycine max
  Clone ID: 700764667H1
atcgtgtcctcgacttgaatcagtacatatcgtgtggagtgaacctgacacctccgtcagataatcttttaaaatttctgcatcacgttgtaaagtccaagtctaaagatggaagatatgtgaaattgaggtttgatatcaacaa

SEQ ID NO: 91603 - DNA, 148 bp, Glycine max
  Clone ID: 700764668H1
agtgggttgagtagttctgcatcatagtcttaaacattaaagcttcgtagacgtcgacaatgctagacatcaaaggccaactggtactcttcttcctatggctcatatcaacgattctgatacgttccatcttcaagaaaccacagcg

SEQ ID NO: 91604 - DNA, 141 bp, Glycine max
  Clone ID: 700764672H1
ggcagtgataatagatgtgcatccattgggtacgtggatgtgcacgtgtgggaatttggagtgcatgatgagccacattcagagggataaaataatggttcttatgttgatttggagtggggtggtttaatttgttggggc

SEQ ID NO: 91605 - DNA, 140 bp, Glycine max
  Clone ID: 700764674H1
agcatcacttgggtcaatagatttcatcacctctttatgtcaatctgaagatgagtcagaaaagatcaaggaagctgttaatacatcttcttatggaagtgaatatcttcatgctgccctttcagttaatcagaaggtaa

SEQ ID NO: 91606 - DNA, 141 bp, Glycine max
  Clone ID: 700764676H1
tacaaacatggcaatgaagcagttcttgtgggttgttctgtccctttctttggtccttggagtggccaatagctttgattttcacgacaaggatttggagtccgaggaaagcctgtgggacttgtacgagagatggaggag

SEQ ID NO: 91607 - DNA, 148 bp, Glycine max
  Clone ID: 700764678H1
gccctatttggaggaaaaaaggacaataatgggacaagtgatgatgttccttctaaggccggaattctaggaaacatgcacaatctttatgagactgtgaagaaggcacaaatggttgtccaagttgaagctgtgcgtgtgcagaaag

SEQ ID NO: 91608 - DNA, 148 bp, Glycine max
  Clone ID: 700764679H1
gcaagaatggcacttcgttgcatggtgatgtcgcttctgttctcttcactcttggtcttgcgagagaaagccatgccaaagacgaagatttttggcatgctgtttggccaaacactcccattccaagttcattgcgagatcttctaaa

SEQ ID NO: 91609 - DNA, 158 bp, Glycine max
  Clone ID: 700764681H1
tcggtcttcggctcgagcttgatctacgttacgcttttagtgaccggatctgtatggatgtgaaccagatctacacgccgaaggtggttttggcctggtctttcatagatctgatgcatggaggctcagatctactgtacagaggtgtgcgattcatg

SEQ ID NO: 91610 - DNA, 144 bp, Glycine max
  Clone ID: 700764682H1
gttctagatcgcgagcggccacccttttggattagcataacagagagatccatcctcagtcattcgcaatggcccgacgactccttcgacttacctccctctgtcagctctccatcgccgactcgcgtcgcctcctctcctctg

SEQ ID NO: 91611 - DNA, 144 bp, Glycine max
  Clone ID: 700764683H1
gagaaaagttagggttcacaacttttccttttccttttgcttgcgaatctgaatcaaataatcaatcatccattcattattcatcaagtcgtcggcgaagaaaatcacgctgaagagttcggacggcgaggctttcgaggtgga

SEQ ID NO: 91612 - DNA, 147 bp, Glycine max
  Clone ID: 700764685H1
cgctcgagcgaatcggctgagcaccctacaacaacaacacaaccactcctcacacaactaatggaagaagggcaaagaaaaacaacaacactacttctatgctcccacattgtggttcttcttttactctccctagtggccgagact

SEQ ID NO: 91613 - DNA, 147 bp, Glycine max
  Clone ID: 700764686H1
atttctcattctcccatttcctctcagaaccctcgatcactcccacgcgctcctctatcctctccttcaccgtcgctctctccaacgatcacaacaacatcgtcatcccatggcaaacgccgcatctggtatggcagtccatgatga

SEQ ID NO: 91614 - DNA, 145 bp, Glycine max
  Clone ID: 700764687H1
ggaggaaatccgcttcatggtcagtccagaactgatggttggcatgcttttcttgccagctatggcagataatgaggctatagaaattgttggtgtggaaaggttctcaagttatacagggtatgcttcatcatttcgattttct

SEQ ID NO: 91615 - DNA, 142 bp, Glycine max
  Clone ID: 700764688H1
tttcacccttcacacgtggtggtggtgttgttcttcttctcttcccctttctttttcttcttctgagcttgtttaagcgctttctatttgattgccattaacatatattatcacaatgtgtggtattcttgctgttcttggt

SEQ ID NO: 91616 - DNA, 104 bp, Glycine max
  Clone ID: 700764689H1
gcacgcacgcgcacggaagcccggacgacggctcgagagatccagtggcttcacctcccacgtcgcaatggcaatggactcaagggtacgtcaagcaaggagtg

SEQ ID NO: 91617 - DNA, 140 bp, Glycine max
  Clone ID: 700764691H1
gttcgattcttttggtgttccagggagatcgattgataccgtcccgttgattttccaattcgacgaataagggtatcacatctcttaatcaaccatgtttacccgaatttttggtaaacctaaaccggaagtcaatactc

SEQ ID NO: 91618 - DNA, 140 bp, Glycine max
  Clone ID: 700764692H1
gtgaactatgcctgagcggggcgaagcagaggaaactctggtggaggcccgcagcgatactgacgtgcaaatcgttcgtctgacttgggtataggggcgaaagactaatcgaaccgtctagtagctggttccctccgaag

SEQ ID NO: 91619 - DNA, 71 bp, Glycine max
  Clone ID: 700764693H1
cacctctccaaaacttgtatctgaggatattattactcagcaaaaattcatggaagttccacacagcatac

SEQ ID NO: 91620 - DNA, 148 bp, Glycine max
  Clone ID: 700764694H1
ttggatatctgctgtacttctaaaaagaatggcatgctgttgcttcatggacttgggatgcccaggatgagacctgtgggatttgtaggatggcctttgatggatgttgtcctgactgtaaacttcctggagatgactgcgcattgat

SEQ ID NO: 91621 - DNA, 150 bp, Glycine max
  Clone ID: 700764695H1
caacaatgggaggtgcttatcaagaatctggtcgagtgtggtatgcaaaagacatagcaatcccagaaagggcttgtgcatggatgtctcatggtttcatgagtgtaaatacaaagttgggagctgggaaagcttttttgagatcccttt

SEQ ID NO: 91622 - DNA, 151 bp, Glycine max
  unsure (1)..(151): unsure at all n locations
  Clone ID: 700764696H1
ctcacttccttgtccgattcctcccaacgatgccagttaancagatctatctgcttctacgtcatggccaccggacaactattctcccgcactacacaggctttgttttacaactataagccacttcccatacagcggatgcttgattttg

SEQ ID NO: 91623 - DNA, 246 bp, Glycine max
  Clone ID: 700764501H1
caatgccagtgttcccgaaatcgtgggcggcgattctgttatcattcgataacgttggggtgtggaacttgaggtccgagcttgctgagaatcgctacttgggacaacaattgtacatcagtgttctacactcctgagcgttctctgagggacgagtacaacatcccggagtacgcgttgctttgtggcgtagtgaagggtctgccaaagccagagccatatcactgatgttgggccactatgaag

SEQ ID NO: 91624 - DNA, 239 bp, Glycine max
  Clone ID: 700764502H1
gttaatttgagcataaaccataaacgaatcttgtgctttttccgtgggtttgagatggatgagaatgatgatgatgaaggaaaactatgtgatacgtctctctcttcaagaatcaaaggaaaattagattaattgtgacgatgatgatcagagaggaaaagggtgtgaagcctgttctactaaaatttggtttggctttggctctttcatttgctggatttatctactcacgcctcaga

SEQ ID NO: 91625 - DNA, 89 bp, Glycine max
  Clone ID: 700764503H1
cctaaatacaattaactaaaccaacaaacgcaaactcaattcctggtttattcgaaggcacgaaagcatacagaaaagaaaatgggggc

SEQ ID NO: 91626 - DNA, 237 bp, Glycine max
  Clone ID: 700764504H1
cgcgtcgctccgcaccagtttcaccgcacgaatatcttattgtttggagcgatccgagaaaaactctgtaaacatgttggtttaccaggacctccttacaggtgatgagcttctctctgactccttccgttacaaggaaattgagaatggaatgctgtgggaagttgaggggaagtgggttgttaaaggagcagttgatgtagacattggtgcaaacccgtctgctgagggtggagg

SEQ ID NO: 91627 - DNA, 241 bp, Glycine max
  Clone ID: 700764505H1
aaacgatccaaactcttttttcatttgcagcatcaaaatgagtggtagcaacgatggtagcggcagctggagctctaggtttttgaaggtggctagtgcagctgccgctacagccgccgttgccggcggtttatatgccattctttcatcctcaacctctgctagctctgagatggaagtgccgtttggcagcgcacggcgtgagagcaaagaacgtgacgatcgtggctccgggtctcat

SEQ ID NO: 91628 - DNA, 240 bp, Glycine max
  Clone ID: 700764506H1
gaaagaaagaagttctaaggaagagggaatatgcagaatacaaggtgctaattgcctatttgcaataacaacatcagcgatccaaccttagtattcttcaacccagagagagttgtaataataaatgacaacaacttaaacgatgacaggaggagcttatgtagattcgggaaatgcagagcaatttgatgggaaggtcacggcattcgtattagttacatgctttgtggcagccatggg

SEQ ID NO: 91629 - DNA, 240 bp, Glycine max
  Clone ID: 700764509H1
ctcgagccgctcgagccgcgcaaactcattctgggcggcgatagttttatcgttctctatctccaagataggtcggagaacacggtacgatgtcacttgcctccgatgatcagaatccaccacttcttcccgtgcacgagccaatggaaggaacacgcaccagcgtctccttcagcatcaaaacaattctaacactggaaaacttgtagtggattctaggacctatgctgtctcttttca

SEQ ID NO: 91630 - DNA, 237 bp, Glycine max
  Clone ID: 700764510H1
caagacattactatgttatgggacataatagctgcggcgagaacagaaagcaatagagtagtgatatcttggaacataataccttcaatgcaaaagaccaaacatcttggccctgtaacaaatgggaatggaggctcctaaaatgaccctcagaaccttggcagctctggttgtaactccaaaatatcactactctattactatctgtcgttgcagcaggtattatgttcgaagaca

SEQ ID NO: 91631 - DNA, 241 bp, Glycine max
  Clone ID: 700764511H1
gaacaagagataaccgaataaacccacaaaacaacacaaagcagcacaagaaggtgttccattttcaacactcatcagatcccagtcatcaattgcgttaacaactcgtaaggcaaccatgaggggcattctttctgtaaggacagccttggttcaacatcgtagtgagaaattgggccttggtttcaggctatttagcactcagggtgcttccactgctagtaccccacagccgccgcca

SEQ ID NO: 91632 - DNA, 241 bp, Glycine max
  Clone ID: 700764513H1
caaaaaccaatccacaccctataaaataacactcctttgtgtgtctgcattttgattgattccctcattcttcatccatagacatggccaccgtcacttctgcagccgttgctattccctcattcactggcctcaaggcaagcgcaggcaaagtgagtgccgcagttaaagtctcagctccccaagccacaaggttgggcatcaaggcttcgctgaaagacgttggagtcgctgttgtggc

SEQ ID NO: 91633 - DNA, 239 bp, Glycine max
  Clone ID: 700764514H1
caactggctccagacagtggcttctaatcctgaagcaatcctcttcaagtttgtacctatttcctcacttctcacaggaattcctggaagtggctatcttagtcatgcaatcaatttgtatttacgctataagccccctccggatgatttacaatgcttcttggagtttcaaattccaaggcaatgggcacccatgttttatgaccttcctctgaggcatcaaaggaaaaagtgttctt

SEQ ID NO: 91634 - DNA, 244 bp, Glycine max
  Clone ID: 700764515H1
acgaaacagaaaatgccaggactcacagcaccttccgattactcccaagaacccccccgccactcttctcttctcatcaacgccaaggaccctttcaatgcggagccaccgcgtgctgcgttggttgcttcctacgtcaccccttccgatttcttctataagaggaaccacggtccaatccccatcgttgagaacatcaacagatattccgtgaacgtgtccggcttggtggagcgtcccaaac

SEQ ID NO: 91635 - DNA, 244 bp, Glycine max
  Clone ID: 700764516H1
ctctttctctcttcatcatcgtcccctctctctcttcctttgccttgtctccgtgtgaaagatcacaactccaccgtcaccgatttccaaggtttcttggtgctgctggtgtattatacatgcttacatctgcatgtgctggtgagatgtgcttgcgttggaaattctccttcattctctctattccccacttttctgtagcactttacccttcacggatcttttcaagcattttttggttatg

SEQ ID NO: 91636 - DNA, 236 bp, Glycine max
  Clone ID: 700764518H1
aaaaaatgggttcttctctgtggacctgtctgattttgttatcacttgcttctgcttccttcgccgccaacccaagagcaccaattgatgtgtcatttggcagaaactatgtgcctacctgggcctttgatcacatcaaatacctcaatggtggttctgagattcagcttcatcttgataaatacacaggtactggcttccaatcaaaagggtcctacttgtttggtcacttcagc

SEQ ID NO: 91637 - DNA, 152 bp, Glycine max
  Clone ID: 700764519H1
gttctagatcgcgagcggccaccctttttttggttaggttttgcttaaaagaggggaaatggtaggttgacaagttaggaagcagaatgaggattttttattttatcattcttgaagtgtcattgcaactcccccctttctcacaaattcac

SEQ ID NO: 91638 - DNA, 237 bp, Glycine max
  Clone ID: 700764520H1
gcacgaacaaacaatcacattacacacttctctctcttcaatggccggaatccgcttgctgccggaagactcccacgtctcccaacaatcccgcgcggtgcctctctccgccgccgatctggtctccgacgacgaccgctccgtcgccgctgactcctggtccatcaagagcgagtatggcagcactctcgacgacgaccagcgccacgccgacgccgccgaagctctctccaacgc

SEQ ID NO: 91639 - DNA, 237 bp, Glycine max
  Clone ID: 700764521H1
gcagaagaagaagaacaacaacaaagggcttctgaattatcgtgttttgatcagaatctgaggagaaaatcacataatttcgaatttgagttttcgtgtagaaaaaggaagagaagaaaatggaatcggaggatttggtcaaacaggaattggaggaattgcagaaacaattggggaagaagcaaaagtgtgaagcttctgtttcgtctcttaaaacccgtctccaacgcacttacc

SEQ ID NO: 91640 - DNA, 87 bp, Glycine max
  Clone ID: 700764522H1
gtgcaagagcggttcataaaccgcacttacacgcacttgacagctgtgttccgcaatccttcacgagacgtgttgtaaaatgttgtt

SEQ ID NO: 91641 - DNA, 240 bp, Glycine max
  Clone ID: 700764523H1
gatgacagcaaagtggtatctcattgtgtgtgttgtagcgatctgggccgttgatctgggttcatcatcacaccatgcccgtgccccagcaccagcaccgtcagtggagtgttcaaacctggtattgaccttatcggattgcctcaccttcgttagcaacggcagcaccgtcaccaacacacagggaacatgctgctcttccttgaaaactgtgctcaacacagcccctaagtgcctttg

SEQ ID NO: 91642 - DNA, 240 bp, Glycine max
  Clone ID: 700764524H1
gtttactctggttatacttgttatactggcgttgcagggtttgtgcctgctgacattgaaactgttagataccgagtattcttgggacacaaacaatactttgtatcttcagatgttggtgcgggaaagatgcaatggtatgcatttcacaaagaacctcctggtggtgttgatgagcccaacggaaaaaaggtcaggttgcttaggatatttgagggctggtgtgataatgctgtagat

SEQ ID NO: 91643 - DNA, 240 bp, Glycine max
  Clone ID: 700764525H1
ccagtttataagcctattccaaaaccaattcctattgttaagcctattccaaagtcaattccagttgctaagccaattcctaatgaagaagaaaaattcaaaggatttattccaaagccaattcctataattaagcctattccaaagataattcctcattacgaaacctattccaaagataattcctattgttaaacctattcctattccagtttataagcctaaaccaaaactaattcc

SEQ ID NO: 91644 - DNA, 109 bp, Glycine max
  Clone ID: 700764527H1
cagagcttcaggaagccagtgctagtgatggaggggcacaggacaatggtcggagagttccctcaaagtgcctgcccaaatacgcgtgctgcatgcgagcaggcactcg

SEQ ID NO: 91645 - DNA, 237 bp, Glycine max
  Clone ID: 700764528H1
aggaggaggatggtgtccccgatgtcaacggttctggtgacgggaggggcaggcttgatcggatcccacacggtgcttcagcttctgaagcagggcttcagggtttccatcatcgacaaccttgacaattccctcatcgaagccgttcacagggttcgccgcctagtcggtcctcatctttccaacaacctcaccttcttccacggagatctccgcaatgttcaggatttggaggca

SEQ ID NO: 91646 - DNA, 225 bp, Glycine max
  Clone ID: 700764529H1
attagtctcatattcattcggagatgagtggttgcaatcacaaaggtaatggatagcagaactgttgtgtgatagtccataagttacggcgttaacatatggatatcggacaacagttctgctactgagtacctttgtgagtgcaaccattattctcatattcaggcggagattatgcaaccaaacctcagaatcagaatatgcaaagcttccaccagggcctcg

SEQ ID NO: 91647 - DNA, 236 bp, Glycine max
  Clone ID: 700764530H1
tttcgggggagtttcttcttggatcttaccctcttgtttgctaatattctcattcttctgtctctgcttcttctccttgtaagttctctcgctcgctctctccgcctgtttcttctccttgtggactgtaagagctgaactaagagatggggttgtctttcaccaagctttttagccggctctttgctaagaaagagatgcgtattctcatggtaggtcttgatgctgctggtaag

SEQ ID NO: 91648 - DNA, 241 bp, Glycine max
  Clone ID: 700764531H1
cccctcccaatcctctttttctcttaatttctcatcatatcatatctattaatcttacacatatattaagacatagatataatttttttcgttttatttttccttgcatgggctgttaagataagatgtctcgcacgtgctcacagtgcggcaacaacggccacaactcgcggacatgcaccgacggtggcgccgccgcttcctgcggcgggtctcccagggcgaacggcatcatgctgtt

SEQ ID NO: 91649 - DNA, 161 bp, Glycine max
  unsure (1)..(161): unsure at all n locations
  Clone ID: 700764532H1
catccacttagtggcagtgttgtctctctgttactaccgcatcacccacttcttcctccaacctccaacagtcgncatggcttctcatgactgctgcggagcttcttctctcgctgctctagttcttcaaccaagccttccggtggcgaccggtgtcgcgg

SEQ ID NO: 91650 - DNA, 226 bp, Glycine max
  Clone ID: 700764533H1
gaagagggggtcagagtgagaaagagaaagagagaattcgtaaaccctaatttcggaaagatcggcgatgactgcctccaaggatcgcgagaacttcgtctacatcgccaaactcgccgagcaggccgagcgttacgaagagatggtggaatcaatgatgaacgttgcgaatctcgacgttgaactgacggtggaggagcggaatttactttctgttgggtacaag

SEQ ID NO: 91651 - DNA, 235 bp, Glycine max
  Clone ID: 700764534H1
ctcttttacaccacttcaacttctagtgaaatatctgatcaattaatggctcagtatttctctttgtatgttttggtgtttgccagcctagagatggctggattcaatgcaccgctaccgctaccatctccgtcatatggaaatcatacaaccattctcagcatagacggtggtggtatcaggggcattattcctgcgactgttcttgaatacttagacaaggctcttaaggcta

SEQ ID NO: 91652 - DNA, 233 bp, Glycine max
  Clone ID: 700764535H1
tccgggcagacattgctcttgagttggcctggatgaacaatatgattgactttgccttaccatatctcctgcagtttatccgtgagtacactggcaaagttgatgaactggtgaaggataaaatagaagcgcagaaccaagtgaaagctaaagagcaagaagagaaggaagtaattgctcaacagaatatgtatgctcagttgttgcctcttgctttgcctgcaccgccaatg

SEQ ID NO: 91653 - DNA, 235 bp, Glycine max
  Clone ID: 700764536H1
ggtaaatggggttctcttcactggtggatgggctaaaagtggtttatattttgaaactgtcacaaaaatatttaagaaaattttagagaagaatgatgctggagatcatttcccattatttgccacctgcttaggctttgaactcataacgatgatcataagccaggacaataatattcttgaagagtttagtgcatcaaatcaggcaagtactcttcaatttgtggagaatgca

SEQ ID NO: 91654 - DNA, 234 bp, Glycine max
  Clone ID: 700764537H1
cgtcaggttcatcgtcccactttcttctccttttagggtttcctttttgtttctcctttccagatctgcatcttccattttttaggattaagcggtgagattcgtgaatctgagaaatgtcggattcttctcgggaggagaatgtttacatggcgaaattggcggacaggccgagcgttacgaggagatagttgagttcatggagaaggtagcacagactgtggaggttgagga

SEQ ID NO: 91655 - DNA, 238 bp, Glycine max
  Clone ID: 700764538H1
gttcttttcttctctgtcttcctttaccaaccccaaacatttcttatgtgttaaatttactgattctactcagcaatcagcaatcagcaatcagcaatcagcaatcagcatcattacttttcctttgatttataatcaaaaagcaagggacagacacacagaagttgttatcttgaatcagaaaacatgatgctaagaagctcttcaacaccagttcttggatccctcctctcttcct

SEQ ID NO: 91656 - DNA, 240 bp, Glycine max
  Clone ID: 700764539H1
agtctgtaaaagatattacgaaccttataaaagagccatagtgagtcctactttgtggatgctcagcctcatgacaaagagcatggagacccgggaagaaagggccctttttcttcaattttgagggctttttactgaataagtttgtagtactaaaatgtatgctgtaatagctcatattgagcgatggaaagtatcgggctatttaactatgacttgagctccatgctagtataaata

SEQ ID NO: 91657 - DNA, 229 bp, Glycine max
  Clone ID: 700764541H1
ctttcgctctcttctctgcaaatgcttcagtccaagatggttaggactgtgtaggctgataaagacaacacgcataccgttggaaagaaggatgctgctggccatgttgctgaatttagttcttgcttcctttgtcttcttgagttttatcagagacgggagtgcagggatcactagctctttcattcggtcagagtggccggcaggtgacatcccccttgatcatgaa

SEQ ID NO: 91658 - DNA, 238 bp, Glycine max
  Clone ID: 700764542H1
tcaagaagcagactcaggattctgaatccacgcctccaagaatcacatccaacgtcaaacaaaacctccgcttgctaaagctatggaagagcttccagaatagaaattctagcactcctaggccttctaccagttaccgcaagaagaaggtcgagaaggaagatgatgttgttgacacagacctctatcgtgatcccaccacctccctctactacacaaaccagcagggtatattaga

SEQ ID NO: 91659 - DNA, 235 bp, Glycine max
  Clone ID: 700764543H1
aattttccacgagtatctttaccaggctatgattgatttaggtctcgagaatgaattgctagagtatgggggtcctgacctgttgccatttttgcaaagtgccggtcgtaattctctacacgaggttcgtgctgtgacagccacaatttctccagtgggacaatcgggagcacctatgtcatctaatcaagtcaagtactatgaacttttggcacggtattatgttttgacacgc

SEQ ID NO: 91660 - DNA, 234 bp, Glycine max
  Clone ID: 700764544H1
ggcgatgagtgtgggtattatgtgatgcattggatgtggaacataattggcgcagagttgaagagtgattggagtgtgtggttcggtgatggctcggcactagacccggaggcgatcacaacattacgtaaaaaatgggatatgtagcgccaaatgtaagacaaaaatggatgtaggattatgtctttgtaggtgttatcttcatctatgagaggtcgcaaacatacaatagtt

SEQ ID NO: 91661 - DNA, 235 bp, Glycine max
  Clone ID: 700764546H1
caaagagggagtatcaactcttgatacttcatttaactgctttcgtgcttatggaggttgctgtggaactggaaaatgacctatgttgtgcagacttgagcaagcaaatttctctcctaattatggatgaagatgaagacccccttgctacttgtcctcctgactctcttcagactttttctggatcaatctatcatcctccacaatctgcgttcctctatgagcaggctttgat

SEQ ID NO: 91662 - DNA, 227 bp, Glycine max
  Clone ID: 700764549H1
gtgacacagaattaagcgagagcttcatagtttcttcttcttttctcaccttccttctctcccttcagacaaagggacaaaaaatcagtgtgtgagagagagagagagcaattccaaaaccatgtcccacagtcatctaagtttcgccttgcggattctaggtaacattgccgccttcgtgtgctttctggcaccactaccaacattttatagaatttgtaagaaga

SEQ ID NO: 91663 - DNA, 235 bp, Glycine max
  Clone ID: 700764550H1
ggagcgtgttgtacaaggggcaattttttcaaaacctttatctctctcggaagctcacctcttcctccttcaagctctttcggaatttcccaaaatccttaatgggaggaagagatggttctgactcagaagcttcacgaagccttcaaaggcaccgtcgagaggattactggcccccgaaccgtgtccgccttcaaagaaaaaggaggtctcagtgtctctgacttcgtcaccg
